(19) United States
(12) Patent Application Publication
(10) Pub. No.: US 2023/0203199 A1
(43) Pub. Date: Jun. 29, 2023

(54) ANTIGEN BINDING POLYPEPTIDES, ANTIGEN BINDING POLYPEPTIDE COMPLEXES AND METHODS OF USE THEREOF

(71) Applicant: ModeX Therapeutics, Natick, MA (US)

(72) Inventors: Ronnie Rong WEI, Weston, MA (US); Ling XU, Newton Center, MA (US); Zhi-Yong YANG, Newton Center, MA (US); Edward SEUNG, Medford, MA (US); Gary J. NABEL, Delray Beach, FL (US); Lan WU, Chestnut Hill, MA (US); Mark GRECI, Natick, MA (US); Hao CHEN, Acton, MA (US)

(21) Appl. No.: 17/936,041

(22) Filed: Sep. 28, 2022

Related U.S. Application Data
(60) Provisional application No. 63/292,382, filed on Dec. 21, 2021.
(60) Provisional application No. 63/291,305, filed on Dec. 17, 2021.
(60) Provisional application No. 63/249,833, filed on Sep. 29, 2021.
(60) Provisional application No. 63/249,794, filed on Sep. 29, 2021.
(60) Provisional application No. 63/249,919, filed on Sep. 29, 2021.
(60) Provisional application No. 63/249,722, filed on Sep. 29, 2021.

(51) Int. Cl. C07K 16/46; A61P 35/00

(52) U.S. Cl. CPC C07K 16/468; A61P 35/00; C07K 2317/31; C07K 2317/73; C07K 2317/92

(57) ABSTRACT

Disclosed are antigen binding polypeptides and antigen binding polypeptide complexes (e.g., antibodies and antigen binding fragments thereof) having certain structural features. Also disclosed are polynucleotides and vectors encoding such polypeptides and polypeptide complexes; host cells, chimeric antigen receptors (CARs), immune cells, pharmaceutical compositions and kits containing such polypeptides and polypeptide complexes; and methods of using such polypeptides and polypeptide complexes.

### CROSS REFERENCE TO RELATED APPLICATIONS

[0001] This application claims the priority benefit of U.S. Provisional Application No. 63/249,833, filed Sep. 29, 2021; U.S. Provisional Application No. 63/249,794, filed Sep. 29, 2021; U.S. Provisional Application No. 63/249,919, filed Sep. 29, 2021; U.S. Provisional Application No. 63/249,722, filed Sep. 29, 2021; U.S. Provisional Application No. 63/291,305, filed Dec. 17, 2021; and U.S. Provisional Application No. 63/292,382, filed Dec. 21, 2021; which are all incorporated herein by reference in their entireties.

### REFERENCE TO SEQUENCE LISTING SUBMITTED ELECTRONICALLY

[0002] The content of the electronically submitted sequence listing (Name: 4850_0030001_SeqListing_ST26; Size: 1,196,609 bytes; Date of Creation: Sep. 26, 2022) is herein incorporated by reference in its entirety.

### FIELD

[0003] The present disclosure relates to antigen binding polypeptides and antigen binding polypeptide complexes (e.g., antibodies and antigen binding fragments thereof) having certain structural features. The present disclosure also relates to polynucleotides and vectors encoding such polypeptides and polypeptide complexes; host cells, chimeric antigen receptors (CARs), immune cells, pharmaceutical compositions and kits containing such polypeptides and polypeptide complexes; and methods of using such polypeptides and polypeptide complexes.

### BACKGROUND

[0004] Immunotherapy is the treatment of disease by activating or suppressing the immune system. In recent years, immunotherapy has become of great interest to researchers and clinicians, particularly in its promise to treat cancer and infectious disease. Therapeutic antibodies are an important type of immunotherapy. Therapeutic antibodies can be monospecific, meaning that they have specificity to one antigen or epitope. Therapeutic antibodies have also been engineered to have specificity for two different antigens or epitopes (i.e., bispecific antibodies) or for multiple different antigens or epitopes (trispecific antibodies, tetraspecific antibodies, etc.). In addition, monospecific, bispecific and multispecific antibodies have been combined to form multi-targeting strategies to treat complex human diseases, such as cancer and infectious disease.

[0005] However, the development of therapeutic antibodies can be challenging, especially manufacturing and late stage development. For example, the production of bispecific or multispecific antibodies often requires multiple genes or plasmids for cell line development. These multiple genes or plasmids must be delivered into the same cell to make the correct molecules. Furthermore, bispecific and multispecific antibodies can have mispairing between the heavy and light chains, which can reduce product yield, increase cell line colony screen workload, and create product heterogeneity.

[0006] There is a need for multispecific and multifunctional antigen binding polypeptides and antigen binding polypeptide complexes that can bind to specific combinations of target molecules for selectivity or breadth/neutralization, bring together two or more cell types, bring together targets and deliver activation signals, modify the disease microenvironment, and enhance avidity of binding for improved potency. The present invention meets this unmet need.

[0007] In addition, human immunodeficiency virus (HIV) poses a major infectious disease burden with immense medical and economic impact around the world. Globally, −38 million people have been infected with HIV, and more than 30 million individuals have succumbed to acquired immunodeficiency syndrome (AIDS), a chronic condition of weakened immune system caused by HIV infection. “Global Health Sector Strategy On HIV—2016-2021-Towards Ending AIDS,” World Health Organization, June 2016. There are two major forms of HIV: HIV-1 and HIV-2. HIV-1 is the more prevalent form worldwide, while HIV-2 is less pathogenic and mostly confined to West Africa.

[0008] The major structural proteins of HIV are Gag, Pol and Env. Gag (group specific antigen) is the structural protein for the viral core. Pol is a polyprotein containing the enzymes critical for viral replication: protease (PR), reverse transcriptase (RT), and integrase (IN). Env (envelope) encodes glycoproteins that form the virus's exterior envelope. Env is synthesized as a precursor glycoprotein, gp160, and is then processed into gp120 and gp41. Env interacts with the primary receptor CD4 and a coreceptor (such as chemokine receptor CCR5) to fuse viral and target-cell membranes.

[0009] The genetic heterogeneity and glycan shielding of Env have resisted the development of natural immunity to HIV and posed challenges to traditional vaccine development. It has also prompted a search for alternative approaches to HIV prevention, one of the highest priorities in global health.

[0010] Despite a significant collection of anti-HIV/AIDS drugs available, HIV patients still face daily challenges in taking multiple medicines with strict regimens. Inevitably, most patients will bear the consequences of emergence of drug-resistant viral variants, and develop other health issues from the toxicities of taking anti-HIV medicines long term, such as cardiovascular disease, kidney disease, diabetes, bone disease, liver disease, cognitive disorders, etc. Alternative treatment options are urgently needed for HIV/AIDS patients.

[0011] Broadly neutralizing HIV-1 antibodies (bnAbs) are antibodies that neutralize multiple HIV-1 viral strains. bnAbs target conserved epitopes of the virus, meaning that the targeted epitopes may be more likely to remain even if the virus mutates. As such, bnAbs have been investigated recently for HIV/AIDS treatment and prevention. Human clinical studies have revealed two factors critical for efficacy of bnAbs. First, there is the need to exceed a minimally effective dose, or trough level of circulating bnAbs to prevent infection. Second, there is a need to prevent the emergence of viral escape through resistance mutations.

[0012] Early human clinical studies using bnAbs demonstrated the feasibility and safety of this approach with transient reductions of viral load and acceptable tolerability and immunogenicity. Burton et al., Annu Rev. Immunol. 34:635-659 (2016); Mascola et al., Immunol. Rev. 254:225-244 (2013); Wu et al., Science. 329:856-861 (2010). However, resistant HIV strains emerged rapidly following treatment with individual bnAbs in vitro and in vivo. More recently, a phase II clinical trial with the VRC01 bnAb highlighted the importance of maintaining adequate circulating antibody levels to reduce acquisition rates, suggesting that combination antibody therapy which enhances potency and minimizes escape mutations will be required for effective prevention. Corey et al., N. Engl. J. Med. 384:1003-1014 (2021).

[0013] Multispecific antibodies address the limitations of bnAbs by providing a single antibody type that recognizes multiple independent binding sites on HIV-1 envelope protein. Xu et al., Science. 358(6359):85-90 (2017). Treatment with multispecific antibodies also ensures that independent binding specificities are maintained with the same pharmacokinetics, while treatment with multiple single-target antibodies results in different antibody half-lives that wane at different rates. Furthermore, multispecific antibodies simplify manufacturing and regulatory processes by using one product for clinical development instead of a combination of multiple products.

[0014] Accordingly, multispecific anti-HIV antibodies provide an important technological platform for developing neutralizing antibody-based therapeutics for treating HIV/AIDS, offering a class of medicines with low long-term toxicities and significantly less frequent treatment regimen. Multispecific antibodies also use completely different targets on HIV from the current standard of care HIV/AIDS medicine, complementing to the existing medicines by providing patients alternatives for their disease control and health management. Multispecific antibodies may also offer a meaningful way for HIV prevention in the current absence of an effective HIV vaccine.

[0015] In addition, the development of therapeutic antibodies can be challenging, especially manufacturing and late stage development. For example, the production of multispecific antibodies often requires multiple genes or plasmids for cell line development. These multiple genes or plasmids must be delivered into the same cell to make the correct molecules. Furthermore, multispecific antibodies can have mispairing between the heavy and light chains, which can reduce product yield, increase cell line colony screen workload, and create product heterogeneity.

[0016] As such, there is a need for multispecific and multifunctional antibodies, antigen binding polypeptides and antigen binding polypeptide complexes that can bind to HIV proteins for selectivity or breadth/neutralization, bring together two or more cell types, bring together targets and deliver activation signals, modify the HIV microenvironment, and enhance avidity of binding for improved potency. The present invention meets this unmet need.

### BRIEF SUMMARY

[0017] Provided herein is an antigen binding polypeptide having a structure represented by VL1-VL2-VH2-VH1; VH1-VH2-VL2-VL1; VL1-L1-VL2-L2-VH2-L3-VH1; or VH1-L1-VH2-L2-VL2-L3-VL1; wherein VL1 is a first immunoglobulin light chain variable region; VL2 is a second immunoglobulin light chain variable region; VH1 is a first immunoglobulin heavy chain variable region; VH2 is a second immunoglobulin heavy chain variable region; and L1, L2 and L3 are amino acid linkers.

[0018] Provided herein is an antigen binding polypeptide complex comprising a first polypeptide and a second polypeptide; wherein the first polypeptide has a structure represented by VL1-VL2-VH2-VH1; VH1-VH2-VL2-VL1; VL1-L1-VL2-L2-VH2-L3-VH1; or VH1-L1-VH2-L2-VL2-L3-VL1; wherein the second polypeptide has a structure represented by VL1-VL2-VH2-VH1; VH1-VH2-VL2-VL1; VL1-L1-VL2-L2-VH2-L3-VH1; or VH1-L1-VH2-L2-VL2-L3-VL1; wherein VL1 is a first immunoglobulin light chain variable region; VL2 is a second immunoglobulin light chain variable region; VH1 is a first immunoglobulin heavy chain variable region; VH2 is a second immunoglobulin heavy chain variable region; and L1, L2 and L3 are amino acid linkers.

[0019] Provided herein is an antigen binding polypeptide having a structure represented by VL1-VL2-VH2-VH1-Fc; VH1-VH2-VL2-VL1-Fc; VL1-L1-VL2-L2-VH2-L3-VH1-Fc; VH1-L1-VH2-L2-VL2-L3-VL1-Fc; VL1-L1-VL2-L2-VH2-L3-VH1-L4-Fc; or VH1-L1-VH2-L2-VL2-L3-VL1-L4-Fc; wherein VL1 is a first immunoglobulin light chain variable region; VL2 is a second immunoglobulin light chain variable region; VH1 is a first immunoglobulin heavy chain variable region; VH2 is a second immunoglobulin heavy chain variable region; Fc is a region comprising an immunoglobulin heavy chain constant region 2 (CH2), an immunoglobulin heavy chain constant region 3 (CH3), and optionally, an immunoglobulin hinge; and L1, L2, L3 and L4 are amino acid linkers.

[0020] Provided herein is an antigen binding polypeptide complex comprising a first polypeptide and a second polypeptide; wherein the first polypeptide has a structure represented by VL1-VL2-VH2-VH1-Fc; VH1-VH2-VL2-VL1-Fc; VL1-L1-VL2-L2-VH2-L3-VH1-Fc; VH1-L1-VH2-L2-VL2-L3-VL1-Fc; VL1-L1-VL2-L2-VH2-L3-VH1-L4-Fc; or VH1-L1-VH2-L2-VL2-L3-VL1-L4-Fc; wherein the second polypeptide has a structure represented by Fc; VL1-VL2-VH2-VH1-Fc; VH1-VH2-VL2-VL1-Fc; VL1-L1-VL2-L2-VH2-L3-VH1-Fc; VH1-L1-VH2-L2-VL2-L3-VL1-Fc; VL1-L1-VL2-L2-VH2-L3-VH1-L4-Fc; or VH1-L1-VH2-L2-VL2-L3-VL1-L4-Fc; wherein VL1 is a first immunoglobulin light chain variable region; VL2 is a second immunoglobulin light chain variable region; VH1 is a first immunoglobulin heavy chain variable region; VH2 is a second immunoglobulin heavy chain variable region; Fc is a region comprising an immunoglobulin heavy chain constant region 2 (CH2), an immunoglobulin heavy chain constant region 3 (CH3), and optionally, an immunoglobulin hinge; and L1, L2, L3 and L4 are amino acid linkers.

[0021] Provided herein is an antigen binding polypeptide having a structure represented by VL1-VL2-VH2-VH1-CH1-CL; VH1-VH2-VL2-VL1-CH1-CL; VL1-VL2-VH2-VH1-CL-CH1; VH1-VH2-VL2-VL1-CL-CH1; VL1-L1-VL2-L2-VH2-L3-VH1-L4-CH1-CL; VH1-L1-VH2-L2-VL2-L3-VL1-L4-CH1-CL; VL1-L1-VL2-L2-VH2-L3- VH1-L4-CL-CH1; VH1-L1-VH2-L2-VL2-L3-VL1-L4-CL-CH1; VL1-L1-VL2-L2-VH2-L3-VH1-L4-CH1-L5-CL; VH1-L1-VH2-L2-VL2-L3-VL1-L4-CH1-L5-CL; VL1-L1-VL2-L2-VH2-L3-VH1-L4-CL-L5-CH1; or VH1-L1-VH2-L2-VL2-L3-VL1-L4-CL-L5-CH1; wherein VL1 is a first immunoglobulin light chain variable region; VL2 is a second immunoglobulin light chain variable region; VH1 is a first immunoglobulin heavy chain variable region; VH2 is a second immunoglobulin heavy chain variable region; CH1 is an immunoglobulin heavy chain constant region 1; CL is an immunoglobulin light chain constant region; and L1, L2, L3, L4 and L5 are amino acid linkers.

[0022] Provided herein is an antigen binding polypeptide complex comprising a first polypeptide and a second polypeptide; wherein the first polypeptide has a structure represented by VL1-VL2-VH2-VH1-CH1; VH1-VH2-VL2-VL1-CH1; VL1-VL2-VH2-VH1-CL; VH1-VH2-VL2-VL1-CL; VL1-VL2-VH2-VH1-CH1-CL; VH1-VH2-VL2-VL1-CH1-CL; VL1-VL2-VH2-VH1-CL-CH1; VH1-VH2-VL2-VL1-CL-CH1; VL1-L1-VL2-L2-VH2-L3-VH1-L4-CH1; VH1-L1-VH2-L2-VL2-L3-VL1-L4-CH1; VL1-L1-VL2-L2-VH2-L3-VH1-L4-CL; VH1-L1-VH2-L2-VL2-L3-VL1-L4-CL; VL1-L1-VL2-L2-VH2-L3-VH1-L4-CH1-L5-CL; VH1-L1-VH2-L2-VL2-L3-VL1-L4-CH1-L5-CL; VL1-L1-VL2-L2-VH2-L3-VH1-L4-CL-L5-CH1; or VH1-L1-VH2-L2-VL2-L3-VL1-L4-CL-L5-CH1; wherein the second polypeptide has a structure represented by VL1-VL2-VH2-VH1-CH1; VL1-VL2-VH2-VH1-CH1; VH1-VH2-VL2-VL1-CH1; VL1-VL2-VH2-VH1-CL; VH1-VH2-VL2-VL1-CL; VL1-VL2-VH2-VH1-CH1-CL; VH1-VH2-VL2-VL1-CH1-CL; VL1-VL2-VH2-VH1-CL-CH1; VH1-VH2-VL2-VL1-CL-CH1; VL1-L1-VL2-L2-VH2-L3-VH1-L4-CH1; VH1-L1-VH2-L2-VL2-L3-VL1-L4-CH1; VL1-L1-VL2-L2-VH2-L3-VH1-L4-CL; VH1-L1-VH2-L2-VL2-L3-VL1-L4-CL; VL1-L1- VL2-L2-VH2-L3-VH1-L4-CH1-L5-CL; VH1-L1-VH2-L2-VL2-L3-VL1-L4-CH1-L5-CL; VL1-L1-VL2-L2-VH2-L3- VH1-L4-CL-L5-CH1; or VH1-L1-VH2-L2-VL2-L3-VL1-L4-CL-L5-CH1; wherein VL1 is a first immunoglobulin light chain variable region; VL2 is a second immunoglobulin light chain variable region; VH1 is a first immunoglobulin heavy chain variable region; VH2 is a second immunoglobulin heavy chain variable region; CH1 is an immunoglobulin heavy chain constant region 1; CL is an immunoglobulin light chain constant region; and L1, L2, L3, L4 and L5 are amino acid linkers.

[0023] Provided herein is an antigen binding polypeptide having a structure represented by VL1-VL2-VH2-VH1-CH1-CL-Fc; VH1-VH2-VL2-VL1-CH1-CL-Fc; VL1-VL2-VH2-VH1-CL-CH1-Fc; VH1-VH2-VL2-VL1-CL-CH1-Fc; VL1-L1-VL2-L2-VH2-L3-VH1-L4-CH1-L5-CL-Fc; VH1-L1-VH2-L2-VL2-L3-VL1-L4-CH1-L5-CL-Fc; VL1-L1-VL2-L2-VH2-L3-VH1-L4-CL-L5-CH1-Fc; or VH1-L1-VH2-L2-VL2-L3-VL1-L4-CL-L5-CH1-Fc; wherein VL1 is a first immunoglobulin light chain variable region; VL2 is a second immunoglobulin light chain variable region; VH1 is a first immunoglobulin heavy chain variable region; VH2 is a second immunoglobulin heavy chain variable region; CH1 is an immunoglobulin heavy chain constant region 1; CL is an immunoglobulin light chain constant region; and Fc is a region comprising an immunoglobulin heavy chain constant region 2 (CH2), an immunoglobulin heavy chain constant region 3 (CH3), and optionally, an immunoglobulin hinge; and L1, L2, L3, L4 and L5 are amino acid linkers.

[0024] Provided herein is an antigen binding polypeptide complex comprising a first polypeptide and a second polypeptide; wherein the first polypeptide has a structure represented by VL1-VL2-VH2-VH1-CH1-Fc; VH1-VH2-VL2-VL1-CH1-Fc; VL1-VL2-VH2-VH1-CL-Fc; VH1-VH2-VL2-VL1-CL-Fc; VL1-VL2-VH2-VH1-CH1-CL-Fc; VH1-VH2-VL2-VL1-CH1-CL-Fc; VL1-VL2-VH2-VH1-CL-CH1-Fc; VH1-VH2-VL2-VL1-CL-CH1-Fc; VL1-L1-VL2-L2-VH2-L3-VH1-L4-CH1-Fc; VH1-L1-VH2-L2-VL2-L3-VL1-L4-CH1-Fc; VL1-L1-VL2-L2-VH2-L3-VH1-L4-CL-Fc; VH1-L1-VH2-L2-VL2-L3-VL1-L4-CL-Fc; VL1-L1-VL2-L2-VH2-L3-VH1-L4-CH1-L5-CL-Fc; VH1-L1-VH2-L2-VL2-L3-VL1-L4-CH1-L5-CL-Fc; VL1-L1-VL2-L2-VH2-L3-VH1-L4-CL-L5-CH1-Fc; or VH1-L1-VH2-L2-VL2-L3-VL1-L4-CL-L5-CH1-Fc; wherein the second polypeptide has a structure represented by Fc; VL1-VL2-VH2-VH1-CH1-Fc; VH1-VH2-VL2-VL1-CH1-Fc; VL1-VL2-VH2-VH1-CL-Fc; VH1-VH2-VL2-VL1-CL-Fc; VL1-VL2-VH2-VH1-CH1-CL-Fc; VH1-VH2-VL2-VL1-CH1-CL-Fc; VL1-VL2-VH2-VH1-CL-CH1-Fc; VH1-VH2-VL2-VL1-CL-CH1-Fc; VL1-L1-VL2-L2-VH2-L3-VH1-L4-CH1-Fc; VH1-L1-VH2-L2-VL2-L3-VL1-L4-CH1-Fe; VL1-L1-VL2-L2-VH2- L3-VH1-L4-CL-Fc; VH1-L1-VH2-L2-VL2-L3-VL1-L4-CL-Fc; VL1-L1-VL2-L2-VH2-L3-VH1-L4-CH1-L5-CL-Fc; VH1-L1-VH2-L2-VL2-L3-VL1-L4-CH1-L5-CL-Fc; VL1-L1-VL2-L2-VH2-L3-VH1-L4-CL-L5-CH1-Fc; or VH1-L1-VH2-L2-VL2-L3-VL1-L4-CL-L5-CH1-Fc; wherein VL1 is a first immunoglobulin light chain variable region; VL2 is a second immunoglobulin light chain variable region; VH1 is a first immunoglobulin heavy chain variable region; VH2 is a second immunoglobulin heavy chain variable region; CH1 is an immunoglobulin heavy chain constant region 1; CL is an immunoglobulin light chain constant region; Fc is a region comprising an immunoglobulin heavy chain constant region 2 (CH2), an immunoglobulin heavy chain constant region 3 (CH3), and optionally, an immunoglobulin hinge; and L1, L2, L3, L4 and L5 are amino acid linkers.

[0025] Provided herein is an antigen binding polypeptide complex comprising a first polypeptide and a second polypeptide; wherein the first polypeptide has a structure represented by VL1-VL2-VH2-VH1; VH1-VH2-VL2-VL1; VL1-L1-VL2-L2-VH2-L3-VH1; VH1-L1-VH2-L2-VL2-L3-VL1; VL1-VL2-VH2-VH1-Fc; VH1-VH2-VL2-VL1-Fc; VL1-L1-VL2-L2-VH2-L3-VH1-Fc; VH1-L1-VH2-L2-VL2-L3-VL1-Fc; VL1-L1-VL2-L2-VH2-L3-VH1-L4-Fc; VH1-L1-VH2-L2-VL2-L3-VL1-L4-Fc; VL1-VL2-VH2-VH1-CH1; VH1-VH2-VL2-VL1-CH1; VL1-VL2-VH2-VH1-CL; VH1-VH2-VL2-VL1-CL; VL1-VL2-VH2-VH1-CH1-CL; VH1-VH2-VL2-VL1-CH1-CL; VL1-VL2-VH2-VH1-CL-CH1; VH1-VH2-VL2-VL1-CL-CH1; VL1-L1-VL2-L2-VH2-L3-VH1-L4-CH1; VH1-L1-VH2-L2-VL2-L3-VL1-L4-CH1; VL1-L1-VL2-L2-VH2-L3-VH1-L4-CL; VH1-L1-VH2-L2-VL2-L3-VL1-L4-CL; VL1-L1-VL2-L2-VH2-L3- VH1-L4-CH1-L5-CL; VH1-L1-VH2-L2-VL2-L3-VL1-L4-CH1-L5-CL; VL1-L1-VL2-L2-VH2-L3-VH1-L4-CL-L5-CH1; VH1-L1-VH2-L2-VL2-L3-VL1-L4-CL-L5-CH1; VL1-VL2-VH2-VH1-CH1-Fc; VH1-VH2-VL2-VL1-CH1-Fc; VL1-VL2-VH2-VH1-CL-Fc; VH1-VH2-VL2-VL1-CL-Fc; VL1-VL2-VH2-VH1-CH1-CL-Fc; VH1-VH2-VL2-VL1-CH1-CL-Fc; VL1-VL2-VH2-VH1-CL-CH1-Fc; VH1-VH2-VL2-VL1-CL-CH1-Fc; VL1-L1-VL2-L2-VH2-L3-VH1-L4-CH1-Fc; VH1-L1-VH2-L2-VL2-L3-VL1-L4-CH1-Fc; VL1-L1-VL2-L2-VH2-L3-VH1-L4-CL-Fc; VH1-L1-VH2-L2-VL2-L3-VL1-L4-CL-Fc; VL1-L1-VL2-L2-VH2-L3-VH1-L4-CH1-L5-CL-Fc; VH1-L1-VH2-L2-VL2-L3-VL1-L4-CH1-L5-CL-Fc; VL1-L1-VL2-L2-VH2-L3-VH1-L4-CL-L5-CH1-Fc; or VH1-L1-VH2-L2-VL2-L3-VL1-L4-CL-L5-CH1-Fc; wherein the second polypeptide has a structure represented by Fc; VL1-VL2-VH2-VH1; VH1-VH2-VL2-VL1; VL1-L1-VL2-L2-VH2-L3-VH1; VH1-L1-VH2-L2-VL2-L3-VL1; VL1-VL2-VH2-VH1-Fc; VH1-VH2-VL2-VL1-Fc; VL1-L1-VL2-L2-VH2-L3-VH1-Fc; VH1-L1-VH2-L2-VL2-L3-VL1-Fc; VL1-L1-VL2-L2-VH2-L3-VH1-L4-Fc; VH1-L1-VH2-L2-VL2-L3-VL1-L4-Fc; VL1-VL2-VH2-VH1-CH1; VH1-VH2-VL2-VL1-CH1; VL1-VL2-VH2-VH1-CL; VH1-VH2-VL2-VL1-CL; VL1-VL2-VH2-VH1-CH1-CL; VH1-VH2-VL2-VL1-CH1-CL; VL1-VL2-VH2-VH1-CL-CH1; VH1-VH2-VL2-VL1-CL-CH1; VL1-L1-VL2-L2-VH2-L3-VH1-L4-CH1; VH1-L1-VH2-L2-VL2-L3-VL1-L4-CH1; VL1- L1-VL2-L2-VH2-L3-VH1-L4-CL; VH1-L1-VH2-L2-VL2-L3-VL1-L4-CL; VL1-L1-VL2-L2-VH2-L3-VH1-L4-CH1- L5-CL; VH1-L1-VH2-L2-VL2-L3-VL1-L4-CH1-L5-CL; VL1-L1-VL2-L2-VH2-L3-VH1-L4-CL-L5-CH1; VH1-L1-VH2-L2-VL2-L3-VL1-L4-CL-L5-CH1; VL1-VL2-VH2-VH1-CH1-Fc; VH1-VH2-VL2-VL1-CH1-Fc; VL1-VL2-VH2-VH1-CL-Fc; VH1-VH2-VL2-VL1-CL-Fc; VL1-VL2-VH2-VH1-CH1-CL-Fc; VH1-VH2-VL2-VL1-CH1-CL-Fc; VL1-VL2-VH2-VH1-CL-CH1-Fc; VH1-VH2-VL2-VL1-CL-CH1-Fc; VL1-L1-VL2-L2-VH2-L3-VH1-L4-CH1-Fc; VH1-L1-VH2-L2-VL2-L3-VL1-L4-CH1-Fc; VL1-L1-VL2-L2-VH2-L3-VH1-L4-CL-Fc; VH1-L1-VH2-L2-VL2-L3-VL1-L4-CL-Fc; VL1-L1-VL2-L2-VH2-L3-VH1-L4-CH1-L5-CL-Fc; VH1-L1-VH2-L2-VL2-L3-VL1-L4-CH1-L5-CL-Fc; VL1-L1-VL2-L2-VH2-L3-VH1-L4-CL-L5-CH1-Fc; or VH1-L1-VH2-L2-VL2-L3-VL1-L4-CL-L5-CH1-Fc; wherein VL1 is a first immunoglobulin light chain variable region; VL2 is a second immunoglobulin light chain variable region; VH1 is a first immunoglobulin heavy chain variable region; VH2 is a second immunoglobulin heavy chain variable region; CH1 is an immunoglobulin heavy chain constant region 1; CL is an immunoglobulin light chain constant region; Fc is a region comprising an immunoglobulin heavy chain constant region 2 (CH2), an immunoglobulin heavy chain constant region 3 (CH3), and optionally, an immunoglobulin hinge; and L1, L2, L3, L4 and L5 are amino acid linkers.

[0026] Provided herein is an antigen binding polypeptide or antigen binding polypeptide complex comprising a polypeptide having a structure represented by VL1-VL2-VH2-VH1-Fc-Fc; VH1-VH2-VL2-VL1-Fc-Fc; VL1-L1-VL2-L2-VH2-L3-VH1-Fc-Fc; VH1-L1-VH2-L2-VL2-L3-VL1-Fc-Fc; VL1-L1-VL2-L2-VH2-L3-VH1-L4-Fc-Fc; VH1-L1-VH2-L2-VL2-L3-VL1-L4-Fc-Fc; VL1-L1-VL2-L2-VH2-L3-VH1-L4-Fc-L5-Fc; or VH1-L1-VH2-L2-VL2-L3-VL1- L4-Fc-L5-Fc; wherein VL1 is a first immunoglobulin light chain variable region; VL2 is a second immunoglobulin light chain variable region; VH1 is a first immunoglobulin heavy chain variable region; VH2 is a second immunoglobulin heavy chain variable region; Fc is a region comprising an immunoglobulin heavy chain constant region 2 (CH2), an immunoglobulin heavy chain constant region 3 (CH3), and optionally, an immunoglobulin hinge; and L1, L2, L3, L4 and L5 are amino acid linkers.

[0027] Provided herein is an antigen binding polypeptide or antigen binding polypeptide complex comprising a polypeptide having a structure represented by VL1-VL2-VH2-VH1-CH3; VH1-VH2-VL2-VL1-CH3; VL1-L1-VL2-L2-VH2-L3-VH1-CH3; VH1-L1-VH2-L2-VL2-L3-VL1-CH3; VL1-L1-VL2-L2-VH2-L3-VH1-L4-CH3; VH1-L1-VH2-L2-VL2-L3-VL1-L4-CH3; VL1-VL2-VH2-VH1-CH3-CH3; VH1-VH2-VL2-VL1-CH3-CH3; VL1-L1-VL2-L2-VH2-L3-VH1-CH3-CH3; VH1-L1-VH2-L2-VL2-L3-VL1-CH3-CH3; VL1-L1-VL2-L2-VH2-L3-VH1-L4-CH3-CH3; VH1-L1-VH2-L2-VL2-L3-VL1-L4-CH3-CH3; VL1-L1-VL2-L2-VH2-L3-VH1-L4-CH3-L5-CH3; or VH1-L1-VH2-L2-VL2-L3-VL1-L4-CH3-L5-CH3; wherein VL1 is a first immunoglobulin light chain variable region; VL2 is a second immunoglobulin light chain variable region; VH1 is a first immunoglobulin heavy chain variable region; VH2 is a second immunoglobulin heavy chain variable region; CH3 is an immunoglobulin heavy chain constant region 3; and L1, L2, L3, L4 and L5 are amino acid linkers.

[0028] Provided herein is an antigen binding polypeptide complex comprising a first polypeptide and a second polypeptide; wherein the first polypeptide has a structure represented by VL1-VL2-VH2-VH1; VH1-VH2-VL2-VL1; VL1-L1-VL2-L2-VH2-L3-VH1; or VH1-L1-VH2-L2-VL2-L3-VL1; wherein the second polypeptide has a structure represented by VL3-VL4-VH4-VH3; VH3-VH4-VL4-VL3; VL3-L4-VL4-L5-VH4-L6-VH3; or VH3-L4-VH4-L5-VL4-L6-VL3; wherein VL1 is a first immunoglobulin light chain variable region; VL2 is a second immunoglobulin light chain variable region; VL3 is a third immunoglobulin light chain variable region; VL4 is a fourth immunoglobulin light chain variable region; VH1 is a first immunoglobulin heavy chain variable region; VH2 is a second immunoglobulin heavy chain variable region; VH3 is a third immunoglobulin heavy chain variable region; VH4 is a fourth immunoglobulin heavy chain variable region; and L1, L2, L3, L4, L5 and L6 are amino acid linkers.

[0029] Provided herein is an antigen binding polypeptide complex comprising a first polypeptide and a second polypeptide; wherein the first polypeptide has a structure represented by VL1-VL2-VH2-VH1-Fc; VH1-VH2-VL2-VL1-Fc; VL1-L1-VL2-L2-VH2-L3-VH1-Fc; VH1-L1-VH2-L2-VL2-L3-VL1-Fc; VL1-L1-VL2-L2-VH2-L3-VH1-L4-Fc; or VH1-L1-VH2-L2-VL2-L3-VL1-L4-Fc; wherein the second polypeptide has a structure represented by VL3-VL4-VH4-VH3-Fc; VH3-VH4-VL4-VL3-Fc; VL3-L5-VL4-L6-VH4-L7-VH3-Fc; VH3-L5-VH4-L6-VL4-L7-VL3-Fc; VL3-L5-VL4-L6-VH4-L7-VH3-L8-Fc; or VH3-L5-VH4-L6-VL4-L7-VL3-L8-Fc; wherein VL1 is a first immunoglobulin light chain variable region; VL2 is a second immunoglobulin light chain variable region; VL3 is a third immunoglobulin light chain variable region; VL4 is a fourth immunoglobulin light chain variable region; VH1 is a first immunoglobulin heavy chain variable region; VH2 is a second immunoglobulin heavy chain variable region; VH3 is a third immunoglobulin heavy chain variable region; VH4 is a fourth immunoglobulin heavy chain variable region; Fc is a region comprising an immunoglobulin heavy chain constant region 2 (CH2), an immunoglobulin heavy chain constant region 3 (CH3), and optionally, an immunoglobulin hinge; and L1, L2, L3, L4, L5, L6, L7 and L8 are amino acid linkers.

[0030] Provided herein is an antigen binding polypeptide complex comprising a first polypeptide and a second polypeptide; wherein the first polypeptide has a structure represented by VL1-VL2-VH2-VH1-CH1; VH1-VH2-VL2-VL1-CH1; VL1-VL2-VH2-VH1-CL; VH1-VH2-VL2-VL1-CL; VL1-VL2-VH2-VH1-CH1-CL; VH1-VH2-VL2-VL1-CH1-CL; VL1-VL2-VH2-VH1-CL-CH1; VH1-VH2-VL2-VL1-CL-CH1; VL1-L1-VL2-L2-VH2-L3-VH1-L4-CH1; VH1-L1-VH2-L2-VL2-L3-VL1-L4-CH1; VL1-L1-VL2-L2-VH2-L3-VH1-L4-CL; VH1-L1-VH2-L2-VL2-L3-VL1-L4-CL; VL1-L1-VL2-L2-VH2-L3-VH1-L4-CH1-L5-CL; VH1-L1-VH2-L2-VL2-L3-VL1-L4-CH1-L5-CL; VL1-L1-VL2-L2-VH2-L3-VH1-L4-CL-L5-CH1; or VH1-L1-VH2-L2-VL2-L3-VL1-L4-CL-L5-CH1; wherein the second polypeptide has a structure represented by VL3-VL4-VH4-VH3-CH1; VH3-VH4-VL4-VL3-CH1; VL3-VL4-VH4-VH3-CL; VH3-VH4-VL4-VL3-CL; VL3-VL4-VH4-VH3-CH1-CL; VH3-VH4-VL4-VL3-CH1-CL; VL3-VL4-VH4-VH3-CL-CH1; VH3-VH4-VL4-VL3-CL-CH1; VL3-L6-VL4-L7-VH4-L8-VH3-L9-CH1; VH3-L6-VH4-L7-VL4-L8-VL3-L9-CH1; VL3-L6-VL4-L7-VH4-L8-VH3-L9-CL; VH3-L6-VH4-L7-VL4-L8-VL3-L9-CL; VL3-L6-VL4-L7-VH4-L8-VH3- L9-CH1-L10-CL; VH3-L6-VH4-L7-VL4-L8-VL3-L9-CH1-L10-CL; VL3-L6-VL4-L7-VH4-L8-VH3-L9-CL-L10-CH1; or VH3-L6-VH4-L7-VL4-L8-VL3-L9-CL-L10-CH1; wherein VL1 is a first immunoglobulin light chain variable region; VL2 is a second immunoglobulin light chain variable region; VL3 is a third immunoglobulin light chain variable region; VL4 is a fourth immunoglobulin light chain variable region; VH1 is a first immunoglobulin heavy chain variable region; VH2 is a second immunoglobulin heavy chain variable region; VH3 is a third immunoglobulin heavy chain variable region; VH4 is a fourth immunoglobulin heavy chain variable region; CH1 is an immunoglobulin heavy chain constant region 1; CL is an immunoglobulin light chain constant region; and L1, L2, L3, L4, L5, L6, L7, L8, L9 and L10 are amino acid linkers.

[0031] Provided herein is an antigen binding polypeptide complex comprising a first polypeptide and a second polypeptide; wherein the first polypeptide has a structure represented by VL1-VL2-VH2-VH1-CH1-Fc; VH1-VH2-VL2-VL1-CH1-Fc; VL1-VL2-VH2-VH1-CL-Fc; VH1-VH2-VL2-VL1-CL-Fc; VL1-VL2-VH2-VH1-CH1-CL-Fc; VH1-VH2-VL2-VL1-CH1-CL-Fc; VL1-VL2-VH2-VH1-CL-CH1-Fc; VH1-VH2-VL2-VL1-CL-CH1-Fc; VL1-L1-VL2-L2-VH2-L3-VH1-L4-CH1-Fc; VH1-L1-VH2-L2-VL2-L3-VL1-L4-CH1-Fc; VL1-L1-VL2-L2-VH2-L3-VH1-L4-CL-Fc; VH1-L1-VH2-L2-VL2-L3-VL1-L4-CL-Fc; VL1-L1-VL2-L2-VH2-L3-VH1-L4-CH1-L5-CL-Fc; VH1-L1-VH2-L2-VL2-L3-VL1-L4-CH1-L5-CL-Fc; VL1-L1-VL2-L2-VH2-L3-VH1-L4-CL-L5-CH1-Fc; or VH1-L1-VH2-L2-VL2-L3-VL1-L4-CL-L5-CH1-Fc; wherein the second polypeptide has a structure represented by VL3-VL4-VH4-VH3-CH1-Fc; VH3-VH4-VL4-VL3-CH1-Fc; VL3-VL4-VH4-VH3-CL-Fc; VH3-VH4-VL4-VL3-CL-Fc; VL3-VL4-VH4-VH3-CH1-CL-Fc; VH3-VH4-VL4-VL3-CH1-CL-Fc; VL3-VL4-VH4-VH3-CL-CH1-Fc; VH3-VH4-VL4-VL3-CL-CH1-Fc; VL3-L6-VL4-L7-VH4-L8-VH3-L9-CH1-Fc; VH3-L6-VH4-L7-VL4-L8-VL3-L9-CH1-Fc; VL3-L6-VL4-L7-VH4-L8- VH3-L9-CL-Fc; VH3-L6-VH4-L7-VL4-L8-VL3-L9-CL-Fc; VL3-L6-VL4-L7-VH4-L8-VH3-L9-CH1-L10-CL-Fc; VH3-L6-VH4-L7-VL4-L8-VL3-L9-CH1-L10-CL-Fc; VL3-L6-VL4-L7-VH4-L8-VH3-L9-CL-L10-CH1-Fc; or VH3-L6-VH4-L7-VL4-L8-VL3-L9-CL-L10-CH1-Fc; wherein VL1 is a first immunoglobulin light chain variable region; VL2 is a second immunoglobulin light chain variable region; VL3 is a third immunoglobulin light chain variable region; VL4 is a fourth immunoglobulin light chain variable region; VH1 is a first immunoglobulin heavy chain variable region; VH2 is a second immunoglobulin heavy chain variable region; VH3 is a third immunoglobulin heavy chain variable region; VH4 is a fourth immunoglobulin heavy chain variable region; Fc is a region comprising an immunoglobulin heavy chain constant region 2 (CH2), an immunoglobulin heavy chain constant region 3 (CH3), and optionally, an immunoglobulin hinge; CH1 is an immunoglobulin heavy chain constant region 1; CL is an immunoglobulin light chain constant region; and L1, L2, L3, L4, L5, L6, L7, L8, L9 and L10 are amino acid linkers.

[0032] Provided herein is an antigen binding polypeptide complex comprising a first polypeptide and a second polypeptide; wherein the first polypeptide has a structure represented by VL1-VL2-VH2-VH1; VH1-VH2-VL2-VL1; VL1-VL2-VH2-VH1-Fc; VH1-VH2-VL2-VL1-Fc; VL1-VL2-VH2-VH1-CH1; VH1-VH2-VL2-VL1-CH1; VL1-VL2-VH2-VH1-CL; VH1-VH2-VL2-VL1-CL; VL1-VL2-VH2-VH1-CH1-CL; VH1-VH2-VL2-VL1-CH1-CL; VL1-VL2-VH2-VH1-CL-CH1; VH1-VH2-VL2-VL1-CL-CH1; VL1-VL2-VH2-VH1-CH1-Fc; VH1-VH2-VL2-VL1-CH1-Fc; VL1-VL2-VH2-VH1-CL-Fc; VH1-VH2-VL2-VL1-CL-Fc; VL1-VL2-VH2-VH1-CH1-CL-Fc; VH1-VH2-VL2-VL1-CH1-CL-Fc; VL1-VL2-VH2-VH1-CL-CH1-Fc; VH1-VH2-VL2-VL1-CL-CH1-Fc; VL1-L1-VL2-L2-VH2-L3-VH1; VH1-L1-VH2-L2-VL2-L3-VL1; VL1-L1-VL2-L2-VH2-L3-VH1-Fc; VH1-L1-VH2-L2-VL2-L3-VL1-Fc; VL1-L1-VL2-L2-VH2-L3-VH1-L4-Fc; VH1-L1-VH2-L2-VL2-L3-VL1-L4-Fc; VL1-L1-VL2-L2-VH2-L3-VH1-L4-CH1; VH1-L1-VH2-L2-VL2-L3-VL1-L4-CH1; VL1-L1-VL2-L2-VH2-L3-VH1-L4-CL; VH1-L1-VH2-L2-VL2-L3-VL1-L4-CL; VL1-L1-VL2-L2-VH2-L3-VH1-L4-CH1-L5-CL; VH1-L1-VH2-L2-VL2-L3-VL1-L4-CH1-L5-CL; VL1-L1-VL2- L2-VH2-L3-VH1-L4-CL-L5-CH1; VH1-L1-VH2-L2-VL2-L3-VL1-L4-CL-L5-CH1; VL1-L1-VL2-L2-VH2-L3-VH1- L4-CH1-Fc; VH1-L1-VH2-L2-VL2-L3-VL1-L4-CH1-Fc; VL1-L1-VL2-L2-VH2-L3-VH1-L4-CL-Fc; VH1-L1-VH2-L2-VL2-L3-VL1-L4-CL-Fc; VL1-L1-VL2-L2-VH2-L3-VH1-L4-CH1-L5-CL-Fc; VH1-L1-VH2-L2-VL2-L3-VL1-L4-CH1-L5-CL-Fc; VL1-L1-VL2-L2-VH2-L3-VH1-L4-CL-L5-CH1-Fc; or VH1-L1-VH2-L2-VL2-L3-VL1-L4-CL-L5-CH1-Fc; wherein the second polypeptide has a structure represented by VL3-VL4-VH4-VH3; VH3-VH4-VL4-VL3; VL3-VL4-VH4-VH3-Fc; VH3-VH4-VL4-VL3-Fc; VL3-VL4-VH4-VH3-CH1; VH3-VH4-VL4-VL3-CH1; VL3-VL4-VH4-VH3-CL; VH3-VH4-VL4-VL3-CL; VL3-VL4-VH4-VH3-CH1-CL; VH3-VH4-VL4-VL3-CH1-CL; VL3-VL4-VH4-VH3-CL-CH1; VH3-VH4-VL4-VL3-CL-CH1; VL3-VL4-VH4-VH3-CH1-Fc; VH3-VH4-VL4-VL3-CH1-Fc; VL3-VL4-VH4-VH3-CL-Fc; VH3-VH4-VL4-VL3-CL-Fc; VL3-VL4-VH4-VH3-CH1-CL-Fc; VH3-VH4-VL4-VL3-CH1-CL-Fc; VL3-VL4-VH4-VH3-CL-CH1-Fc; VH3-VH4-VL4-VL3-CL-CH1-Fc; VL3-L6-VL4-L7-VH4-L8-VH3; VH3-L6-VH4-L7-VL4-L8-VL3; VL3-L6-VL4-L7-VH4-L8-VH3-Fc; VH3-L6-VH4-L7-VL4-L8-VL3-Fc; VL3-L6-VL4-L7-VH4-L8-VH3-L9-Fc; VH3-L6-VH4-L7-VL4-L8-VL3-L9-Fc; VL3-L6-VL4-L7-VH4-L8-VH3-L9-CH1; VH3-L6-VH4-L7-VL4-L8-VL3-L9-CH1; VL3-L6-VL4-L7-VH4-L8-VH3-L9-CL; VH3-L6-VH4-L7-VL4-L8-VL3-L9-CL; VL3-L6-VL4-L7-VH4-L8-VH3-L9-CH1-L10-CL; VH3-L6-VH4-L7-VL4-L8-VL3-L9-CH1-L10-CL; VL3-L6-VL4- L7-VH4-L8-VH3-L9-CL-L10-CH1; VH3-L6-VH4-L7-VL4-L8-VL3-L9-CL-L10-CH1; VL3-L6-VL4-L7-VH4-L8-VH3-L9-CH1-Fc; VH3-L6-VH4-L7-VL4-L8-VL3-L9-CH1-Fc; VL3-L6-VL4-L7-VH4-L8-VH3-L9-CL-Fc; VH3-L6-VH4-L7-VL4-L8-VL3-L9-CL-Fc; VL3-L6-VL4-L7-VH4-L8-VH3-L9-CH1-L10-CL-Fc; VH3-L6-VH4-L7-VL4-L8-VL3-L9-CH1-L10-CL-Fc; VL3-L6-VL4-L7-VH4-L8-VH3-L9-CL-L10-CH1-Fc; or VH3-L6-VH4-L7-VL4-L8-VL3-L9-CL-L10-CH1-Fc; wherein VL1 is a first immunoglobulin light chain variable region; VL2 is a second immunoglobulin light chain variable region; VL3 is a third immunoglobulin light chain variable region; VL4 is a fourth immunoglobulin light chain variable region; VH1 is a first immunoglobulin heavy chain variable region; VH2 is a second immunoglobulin heavy chain variable region; VH3 is a third immunoglobulin heavy chain variable region; VH4 is a fourth immunoglobulin heavy chain variable region; Fc is a region comprising an immunoglobulin heavy chain constant region 2 (CH2), an immunoglobulin heavy chain constant region 3 (CH3), and optionally, an immunoglobulin hinge; CH1 is an immunoglobulin heavy chain constant region 1; CL is an immunoglobulin light chain constant region; and L1, L2, L3, L4, L5, L6, L7, L8, L9 and L10 are amino acid linkers.

[0033] Also provided herein is an antigen binding polypeptide or antigen binding polypeptide complex that specifically binds to a viral peptide or an HIV protein.

[0034] Also provided herein is an antibody or antigen binding fragment thereof comprising an antigen binding polypeptide or antigen binding polypeptide complex described herein.

[0035] Provided herein is a polypeptide having at least 90% identity, at least 95% identity, or 100% identity to any one of SEQ ID NOs:32-43, 62-79, 130-138, 633, 635, 637, 639, 641, 643, 645, 647, 649, 651, 653, 655, 657, 659, 661, 663, 665, 667, 669, 671, 673, 675, 677, and 679. Also provided herein is a polypeptide having at least 90% identity, at least 95% identity, or 100% identity to the amino acid sequence of SEQ ID NOs:32 or 33 that does not contain the eight histidine residues at the C-terminus. Also provided herein is a polypeptide encoded by a polynucleotide having at least 90% identity, at least 95% identity, or 100% identity to any one of SEQ ID NOs:44-55, 80-97, 139-147, 634, 636, 638, 640, 642, 644, 646, 648, 650, 652, 654, 656, 658, 660, 662, 664, 666, 668, 670, 672, 674, 676, 678, and 680.

[0036] Provided herein is a polynucleotide encoding an antigen binding polypeptide or antigen binding polypeptide complex described herein. Also provided herein is a polynucleotide having at least 90% identity, at least 95% identity, or 100% identity to any one of SEQ ID NOs:44-55, 80-97, 139-147, 634, 636, 638, 640, 642, 644, 646, 648, 650, 652, 654, 656, 658, 660, 662, 664, 666, 668, 670, 672, 674, 676, 678, and 680. Also provided herein is a polynucleotide encoding a polypeptide having at least 90% identity, at least 95% identity, or 100% identity to any one of SEQ ID NOs:32-43, 62-79, 130-138, 633, 635, 637, 639, 641, 643, 645, 647, 649, 651, 653, 655, 657, 659, 661, 663, 665, 667, 669, 671, 673, 675, 677, and 679, or a polynucleotide encoding a polypeptide having at least 90% identity, at least 95% identity, or 100% identity to an amino acid sequence of SEQ ID NO:32 or 33 that does not contain the eight histidine residues at the C-terminus.

[0037] Provided herein is a vector comprising a polynucleotide described herein.

[0038] Provided herein is a host cell comprising a polynucleotide or vector described herein.

[0039] Provided herein is a chimeric antigen receptor (CAR) comprising an antigen binding polypeptide or antigen binding polypeptide complex described herein. Also provided herein is an immune cell comprising a CAR described herein.

[0040] Provided herein is a pharmaceutical composition comprising (i) an antigen binding polypeptide, antigen binding polypeptide complex, antibody or antigen binding fragment thereof, polypeptide, polynucleotide, vector, host cell, CAR or immune cell described herein, or a combination thereof, and (ii) a pharmaceutically acceptable carrier.

[0041] Provided herein is a kit comprising an antigen binding polypeptide, antigen binding polypeptide complex, antibody or antigen binding fragment thereof, polypeptide, polynucleotide, vector, host cell, CAR or immune cell described herein, or a combination thereof.

[0042] Also provided herein are certain methods of use of an antigen binding polypeptide, antigen binding polypeptide complex, antibody or antigen binding fragment thereof, polypeptide, polynucleotide, vector, host cell, CAR or immune cell described herein, or a combination thereof.

### BRIEF DESCRIPTION OF THE DRAWINGS

[0043] Some aspects of the invention are herein described, by way of example only, with reference to the accompanying drawings. With specific reference now to the drawings in detail, it is stressed that the particulars shown are by way of example and for purposes of illustrative discussion of aspects of the invention.

[0044] FIGS. 1A-1F show configurations of exemplary bispecific molecules of the invention from the N-terminus to the C-terminus of the single chain antigen binding polypeptide(s). FIGS. 1A and 1D: bispecific molecules without Fc region. FIG. 1B: bispecific, tetravalent molecule with Fc region. FIGS. 1C, 1E and 1F: bispecific molecules with Fc region. As used in FIGS. 1A-1F, VL1 refers to a first immunoglobulin light chain variable region, VL2 refers to a second immunoglobulin light chain variable region, VH1 refers to a first immunoglobulin heavy chain variable region, and VH2 refers to a second immunoglobulin heavy chain variable region. In FIGS. 1B, 1C and 1F, CH2 refers to an immunoglobulin heavy chain constant region 2, and CH3 refers to an immunoglobulin heavy chain constant region 3. In FIGS. 1A and 1F, l1, l2 and l3 refer to amino acid linkers. In FIG. 1D, L1, L2 and L3 refer to amino acid linkers. In FIGS. 1C and 1F, the circle symbol refers to a knob-into-hole modification.

[0045] FIG. 2 shows SD S-PAGE results of Nickel-NTA (Ni-NTA)-purified bispecific molecules with histidine tags, as depicted in FIG. 1A.

[0046] FIGS. 3A-3B show ELISA results of bispecific molecule aCD19aCD38-His or isotype control (Control IgG) binding to CD19 (FIG. 3A) and CD38 (FIG. 3B).

[0047] FIG. 4 shows SDS-PAGE results of protein A-purified bispecific, tetravalent molecules with LALAPA Fc, as depicted in FIG. 1B.

[0048] FIGS. 5A-5B show ELISA results of bispecific, tetravalent aCD28aCD3LALAPAFc, aCD3aCD28LALAPAFc, or isotype control (Control IgG) binding to CD3 (FIG. 5A) and CD28 (FIG. 5B). Molecule structures are depicted in FIG. 1C.

[0049] FIG. 6 shows nuclear factor of activated T-cells (NFAT) pathway activation by bispecific, tetravalent aCD28aCD3L1LALAPAFc or aCD3aCD28L1LALAPAFc, or anti-CD3 and anti-CD28 mAbs using NFAT promoter-luciferase expressing human Jurkat T cells.

[0050] FIGS. 7A-7B show ELISA results of bispecific aCD28aCD3LALAPAFc or aCD3aCD28LALAPAFc, or isotype control (Control IgG) binding to CD3 (FIG. 7A) and CD28 (FIG. 7B). Molecule structures are depicted in FIG. 1C.

[0051] FIGS. 8A-8C show configurations of exemplary tetraspecific molecules of the invention. VL1 refers to a first immunoglobulin light chain variable region. VL2 refers to a second immunoglobulin light chain variable region. VL3 refers to a third immunoglobulin light chain variable region. VL4 refers to a fourth immunoglobulin light chain variable region. VH1 refers to a first immunoglobulin heavy chain variable region. VH2 refers to a second immunoglobulin heavy chain variable region. VH3 refers to a third immunoglobulin heavy chain variable region. VH4 refers to a fourth immunoglobulin heavy chain variable region. CH1 refers to an immunoglobulin heavy chain constant region 1. CH2 refers to an immunoglobulin heavy chain constant region 2. CH3 refers to an immunoglobulin heavy chain constant region 3. CL refers to an immunoglobulin light chain constant region. The circle symbol in FIGS. 8A-8C refers to a knob-into-hole modification.

[0052] FIGS. 9A-9D show ELISA results of tetraspecific aCD28aCD3CD19CD38LALAPAFc, aCD3aCD28CD19CD38LALAPAFc, aCD28aCD3CD19CD38LALAPAFc, or aCD28aCD3CD38CD19LALAPAFc, or isotype control (Control IgG) binding to CD3 (FIG. 9A), CD28 (FIG. 9B), CD19 (FIG. 9C), and CD38 (FIG. 9D). Molecule structures are depicted in FIG. 8A.

[0053] FIG. 10 shows NFκB pathway activation by tetraspecific aCD28aCD3/aCD19CD38L1LALAPAFc or aCD3aCD28/CD19CD38L1LALAPAFc, or anti-CD3 mAbs using NFκB promoter-luciferase expressing human Jurkat T cells.

[0054] FIGS. 11A-11B show activation (CD69+) by tetraspecific molecules aCD28aCD3/aCD19CD38L1LALAPAFc or aCD3aCD28/CD19CD38L1LALAPAFc, or anti-CD3 mAb, of CD4+(FIG. 11A) or CD8+(FIG. 11B) T cells from three different donors.

[0055] FIG. 12 shows both orientation and linker can affect expression of tetraspecific molecules.

[0056] FIGS. 13A-13D show ELISA results of tetraspecific aCD28aCD3CD19CD38LALAPAFc with different linker lengths as depicted in FIG. 12, or isotype control (Control IgG) binding to CD3 (FIG. 13A), CD28 (FIG. 13B), CD19 (FIG. 13C), and CD38 (FIG. 13D).

[0057] FIGS. 14A-14D show ELISA results of tetraspecific aCD28aCD3CH1/CD19CD38CL LALAPAFc with different linkers as depicted in FIG. 8B, or isotype control (Control IgG) binding to CD3 (FIG. 14A), CD28 (FIG. 14B), CD38 (FIG. 14C), and CD19 (FIG. 14D).

[0058] FIGS. 15A-15D show ELISA results of tetraspecific aCD28aCD3CD38CD19LALAPAFc, aCD28aCD3CD38CD19LALAPAFc, aCD28aCD3CD38CD19LALAPAFc, or aCD3aCD28CD19CD38LALAPAFc, or isotype control (Control IgG) binding to CD3 (FIG. 15A), CD28 (FIG. 15B), CD38 (FIG. 15C), and CD19 (FIG. 15D). Molecule structures are depicted in FIG. 8C.

[0059] FIGS. 15E-15H show ELISA results of tetraspecific aCD28aCD3L1/aCD38aCD19L1_HHLL, aCD28aCD3L1/aCD19aCD38L1_HHLL, aCD3aCD28L1/aCD38aCD19L1_HHLL, aCD3aCD28L1/aCD19aCD38L1_HHLL, or isotype control (Control HuIgG) binding to CD3 (FIG. 15E), CD28 (FIG. 15F), CD38 (FIG. 15G), and CD19 (FIG. 15H).

[0060] FIGS. 16A-16D show configurations of exemplary bispecific molecules of the invention. VL1 refers to a first immunoglobulin light chain variable region. VL2 refers to a second immunoglobulin light chain variable region. VL3 refers to a third immunoglobulin light chain variable region. VL4 refers to a fourth immunoglobulin light chain variable region. VH1 refers to a first immunoglobulin heavy chain variable region. VH2 refers to a second immunoglobulin heavy chain variable region. VH3 refers to a third immunoglobulin heavy chain variable region. VH4 refers to a fourth immunoglobulin heavy chain variable region. CH3 refers to an immunoglobulin heavy chain constant region 3.

[0061] FIGS. 17A-17E show exemplary configurations of trispecific antibody molecules of the invention. FIG. 17A: bispecific arm paired with scFv-Fc. FIG. 17B: bispecific arm paired with Fab-Fc. FIG. 17C: bispecific arm paired with single-chain Fab (scFab). FIG. 17D: bispecific arm paired with scFv-single chain CL-CH1-Fc. FIG. 17E: bispecific arm fused to CH1 and paired with scFv-CL-Fc.

[0062] FIGS. 18A-18C show ELISA results of trispecific aCD28aCD3/aCD38scFv, aCD28aCD3/aCD38Fab, aCD28aCD3/aCD38scFab, aCD28aCD3/aCD38CLCH1, or isotype control (Control IgG) binding to CD3 (FIG. 18A), CD28 (FIG. 18B), and CD38 (FIG. 18C). Molecule structures are depicted in FIGS. 17A-17D.

[0063] FIG. 19 shows the activation (CD69+) by trispecific antibodies aCD28aCD3L1/aCD38scFv, aCD3aCD28/aCD38scFv, aCD28aCD3/aCD38scFab, aCD3aCD28/aCD38scFab, PMA/IO positive or negative isotype (Control IgG) control, of CD2+ T cells from three different donors.

[0064] FIGS. 20A-20C show in vitro cytolysis of lymphoma tumor cells Z-138 by T cells mediated by trispecific antibodies aCD28aCD3L1/aCD38scFv, aCD3aCD28/aCD38 scFv, aCD28aCD3/aCD38scFab, aCD3aCD28/aCD38scFab, PMA/IO or isotype (Control IgG) control from three different donors (FIGS. 20A-20C, respectively).

[0065] FIGS. 21A-21D show ELISA results of trispecific aCD28aCD3CL1CH1/aCD38scFvCL, aCD28aCD3CL1CH1/aCD19scFvCL, or isotype control (Control IgG) binding to CD3 (FIG. 21A), CD28 (FIG. 21B), CD19 (FIG. 21C), and CD38 (FIG. 21 D). Molecule structures are depicted in FIG. 17E.

[0066] FIG. 22 shows non-limiting examples of different configurations of pentaspecific antibody molecules. vL1 is a first immunoglobulin light chain variable region. vL2 is a second immunoglobulin light chain variable region. vL3 is a third immunoglobulin light chain variable region. vL4 is a fourth immunoglobulin light chain variable region. vL5 is a fifth immunoglobulin light chain variable region. vH1 is a first immunoglobulin heavy chain variable region. vH2 is a second immunoglobulin heavy chain variable region. vH3 is a third immunoglobulin heavy chain variable region. vH4 is a fourth immunoglobulin heavy chain variable region. vH5 is a fifth immunoglobulin heavy chain variable region. CH2 is an immunoglobulin heavy chain constant region 2. CH3 is an immunoglobulin heavy chain constant region 3. The circle symbol in the CH3 region indicates a knob-into-hole modification.

[0067] FIGS. 23A-23D show ELISA results of pentaspecific aCD28aCD3LHaCD38/aCD19aCD20, aCD28aCD3LHaCD38/aCD20aCD19, aCD28aCD3HLaCD38/aCD19aCD20, aCD28aCD3HLaCD38/aCD20aCD19, or isotype control (Control IgG) binding to CD3 (FIG. 23A), CD28 (FIG. 23B), CD38 (FIG. 23C), and CD19 (FIG. 23D). Molecule structures are depicted in FIG. 22.

[0068] FIG. 24 shows additional non-limiting examples of different configurations of tetraspecific antibody molecules.

[0069] FIG. 25 depicts an exemplary configuration of a masked tetraspecific antibody. Variable domains (Fv) of the antibody are shown as heavy chain/light chain pairs, with Fv1-Fv3 targeting tumor associated antigens (TAAs) or immune costimulatory receptors, and a fourth Fv targeting CD3 (αCD3 or aCD3). In some aspects, linkers between Fv3 and αCD3 contain one or more protease recognition sites.

[0070] FIG. 26 shows SDS-PAGE results of in vitro cleavage of exemplary masked tetraspecific molecules as depicted. Molecules were treated with either MTP or MMP9 protease as specified.

[0071] FIG. 27 shows ELISA binding results of exemplary masked tetraspecific molecules as depicted in FIG. 26, or negative isotype (Control IgG1), with or without protease treatment. Molecules cleaved or not cleaved by MTP or MMP9 as specified were tested for binding affinity to Trop2 and cMet.

[0072] FIG. 28 shows ELISA binding results of exemplary masked tetraspecific molecules as depicted in FIG. 26, or negative isotype (Control IgG1), with or without protease treatment. Molecules cleaved or not cleaved by MTP or MMP9 as specified were tested for binding affinity to CD28.

[0073] FIG. 29 shows ELISA binding results of exemplary masked tetraspecific molecules as depicted in FIG. 26, or negative isotype (Control IgG1), with or without protease treatment. Molecules cleaved or not cleaved by MTP or MMP9 as specified were tested for binding affinity to CD3.

[0074] FIG. 30 shows cytolysis of HCC1954 tumor cells by PBMCs (E:T:10:1) mediated by exemplary masked tetraspecific molecules as depicted in FIG. 2, or negative isotype (Control IgG1), from PBMCs of two donors (KP63250 and KP63251).

[0075] FIG. 31 shows ELISA binding results of exemplary non-masked tetraspecific molecules as depicted, or negative isotype (hIgG1LALPA) control, to their respective targets of hTrop2, hcMet, hCD28, and hCD3.

[0076] FIG. 32 shows CD69+ activation by exemplary non-masked tetraspecific molecules, or negative isotype (IgG1LALPA) control, of CD2+ T cells from PBMCs of two different donors.

[0077] FIG. 33 shows an additional non-limiting example of a tetraspecific antibody molecule.

[0078] FIG. 34A shows a further non-limiting example of a tetravalent, bispecific antibody configuration, called MX846. MX846 was analyzed for binding to CD3 by biolayer interferometry (BLI) (FIG. 34B), and to CD20 by flow cytometry (FIG. 34C).

[0079] FIG. 35A shows a further non-limiting example of a tetravalent, trispecific antibody configuration, called MX855. MX855 was analyzed for binding to CD3 and CD28 by biolayer interferometry (BLI) (FIG. 35B), and to CD20 by flow cytometry (FIG. 35C).

[0080] FIG. 36A shows a further non-limiting example of a tetraspecific antibody configuration, called MX851. MX851 was analyzed for binding to CD3, CD28 and BCMA by biolayer interferometry (BLI) (FIG. 36B), and to CD20 by flow cytometry (FIG. 36C).

[0081] FIG. 37A shows a further non-limiting example of a tetraspecific antibody configuration, called MX853. MX853 was analyzed for binding to CD3, CD28 and BCMA by biolayer interferometry (BLI) (FIG. 37B), and to CD20 by flow cytometry (FIG. 37C).

[0082] FIGS. 38A-38B show killing of Mantle Cell lymphoma cell line Z-138 by T-cells mediated by tetravalent, tetraspecific MX851 (FIG. 38A) and tetravalent, trispecific MX855 (FIG. 38B).

[0083] FIG. 39A shows a further non-limiting example of a trispecific antibody configuration, called MX894 (VRC01scFv/PGT121×10e8v4L1IgG1LS). MX894 was analyzed for binding to 10e8 fusion peptide (FIG. 39B), and CD4 site-dependent (FIG. 39C) and CD4 site-independent (FIG. 39D) HIV spike protein by biolayer interferometry (BLI).

[0084] FIG. 40A shows a further non-limiting example of a tetraspecific antibody configuration, called MX873 (VRC26.25×10-1074L9/VRC01×PGT121L1 IgG1LS). MX873 was analyzed for binding to CD4 site-dependent (FIG. 40B) and CD4 site-independent (FIG. 40C) HIV spike protein by biolayer interferometry (BLI).

[0085] FIG. 41A shows a further non-limiting example of a tetraspecific antibody configuration, called MX875 (10-1074×VRC26.25L9/VRC01×PGT121L1 IgG1LS). MX875 was analyzed for binding to CD4 site-dependent (FIG. 41B) and CD4 site-independent (FIG. 41C) HIV spike protein by biolayer interferometry (BLI).

[0086] FIG. 42A shows a further non-limiting example of a tetraspecific antibody configuration, called MX877 (STAR_VRC26.25×PGT128L9/STAR_VRC01×PGT121L1 IgG1LS). MX877 was analyzed for binding to CD4 site-dependent (FIG. 42B) and CD4 site-independent (FIG. 42C) HIV spike protein by biolayer interferometry (BLI).

### DETAILED DESCRIPTION OF THE INVENTION

[0087] The invention is directed to antigen binding polypeptides and antigen binding polypeptide complexes (e.g., antibodies or antigen binding fragments thereof) having improved features. In some aspects, the invention enables the generation of multispecific and multifunctional antigen binding polypeptides and antigen binding polypeptide complexes through the expression of complementary self-assembling heavy and light chains expressed with a single polypeptide per arm and, optionally, with the addition of specific amino acid linkers. Because of this multifunctionality, antigen binding polypeptides and antigen binding polypeptide complexes of the invention can bind to specific combinations of target molecules for selectivity or breadth/neutralization, bring together two or more cell types, bring together targets and deliver activation signals, modify the disease microenvironment, and enhance avidity of binding for improved potency.

[0088] Various terms relating to aspects of disclosure are used throughout the specification and claims Such terms are to be given their ordinary meaning in the art, unless otherwise indicated. Other specifically defined terms are to be construed in a manner consistent with the definition provided herein.

### Definitions

[0089] As used herein, the term “antigen binding polypeptide” refers to a polypeptide having the ability to specifically bind to one or more substances that induce an immune response (i.e., one or more antigens or epitopes).

[0090] As used herein, the term “antigen binding polypeptide complex” refers to a group of two, three, four, or more associated polypeptides, wherein at least one polypeptide has the ability to specifically bind to one or more antigens. An antigen binding polypeptide complex, includes, but is not limited to, an antibody or antigen binding fragment thereof.

[0091] The term “antibody” includes, without limitation, a glycoprotein immunoglobulin which binds specifically to an antigen and comprises at least two heavy (H) chains and two light (L) chains interconnected by disulfide bonds. Each H chain comprises a heavy chain variable region (abbreviated herein as VH) and a heavy chain constant region. The heavy chain constant region comprises three constant domains, CH1, CH2 and CH3. Each light chain comprises a light chain variable region (abbreviated herein as VL) and a light chain constant region. The light chain constant region comprises one constant domain, CL. The VH and VL regions can be further subdivided into regions of hypervariability, termed complementarity determining regions (CDRs), interspersed with regions that are more conserved, termed framework regions (FR). Each VH and VL comprises three CDRs and four FRs, arranged from amino-terminus to carboxy-terminus in the following order: FR1, CDR1, FR2, CDR2, FR3, CDR3, FR4. The variable regions of the heavy and light chains contain a binding domain that interacts with an antigen. The constant regions of the antibodies may mediate the binding of the immunoglobulin to host tissues or factors, including various cells of the immune system (e.g., effector cells) and the first component (C1q) of the classical complement system. A heavy chain may have the C-terminal lysine or not. Unless specified otherwise herein, the amino acids in the variable regions are numbered using the Kabat numbering system and those in the constant regions are numbered using the EU system.

[0092] The term “monoclonal antibody,” as used herein, refers to an antibody that is produced by a single clone of B-cells and binds to the same epitope. In contrast, the term “polyclonal antibody” refers to a population of antibodies that are produced by different B-cells and bind to different epitopes of the same antigen. The term “antibody” includes, by way of example, monoclonal and polyclonal antibodies; chimeric and humanized antibodies; human or non-human antibodies; wholly synthetic antibodies; and single chain antibodies. A non-human antibody can be humanized by recombinant methods to reduce its immunogenicity in man.

[0093] The antibody can be an antibody that has been altered (e.g., by mutation, deletion, substitution, conjugation to a non-antibody moiety). For example, an antibody can include one or more variant amino acids (compared to a naturally occurring antibody) which change a property (e.g., a functional property) of the antibody. For example, several such alterations are known in the art which affect, e.g., half-life, effector function, and/or immune responses to the antibody in a patient. The term antibody also includes artificial polypeptide constructs which comprise at least one antibody-derived antigen binding site.

[0094] An “antigen binding fragment” of an antibody refers to one or more fragments or portions of an antibody that retain the ability to bind specifically to the antigen bound by the whole antibody. It has been shown that the antigen-binding function of an antibody can be performed by fragments or portions of a full-length antibody. An antigen binding fragment can contain the antigenic determining regions of an intact antibody (e.g., the complementarity determining regions (CDRs)). Examples of antigen binding fragments of antibodies include, but are not limited to, Fab, Fab′, F(ab′)₂, and Fv fragments, linear antibodies, and single chain antibodies. An antigen binding fragment of an antibody can be derived from any animal species, such as rodents (e.g., mouse, rat, or hamster) and humans or can be artificially produced.

[0095] Furthermore, although the two domains of the Fv fragment, VL and VH, are coded for by separate genes, they can be joined, using recombinant methods, by a synthetic linker that enables them to be made as a single protein chain in which the VL and VH regions pair to form monovalent molecules (known as single chain Fv (scFv); see, e.g., Bird et al. (1988) Science 242:423-426; and Huston et al. (1988) Proc. Natl. Acad. Sci. USA 85:5879-5883). Such single chain antibodies are also intended to be encompassed within the term “antigen-binding fragment” of an antibody.

[0096] Antigen binding fragments are obtained using conventional techniques known to those with skill in the art, and the fragments are screened for utility in the same manner as are intact antibodies. Antigen binding fragments can be produced by recombinant DNA techniques, or by enzymatic or chemical cleavage of intact immunoglobulins.

[0097] As used herein, the term “variable region” typically refers to a portion of an antibody, generally, a portion of a light or heavy chain, typically about the amino-terminal 110 to 120 amino acids, or 110 to 125 amino acids in the mature heavy chain and about 90 to 115 amino acids in the mature light chain, which differ extensively in sequence among antibodies and are used in the binding and specificity of a particular antibody for its particular antigen. The variability in sequence is concentrated in those regions called complementarity determining regions (CDRs) while the more highly conserved regions in the variable domain are called framework regions (FR). Without wishing to be bound by any particular mechanism or theory, it is believed that the CDRs of the light and heavy chains are primarily responsible for the interaction and specificity of an antibody with antigen. In some aspects, the variable region is a mammalian variable region, e.g., a human, mouse or rabbit variable region. In some aspects, the variable region comprises rodent or murine CDRs and human framework regions (FRs). In some aspects, the variable region is a primate (e.g., non-human primate) variable region. In some aspects, the variable region comprises rodent or murine CDRs and primate (e.g., non-human primate) framework regions (FRs).

[0098] The terms “complementarity determining region” or “CDR”, as used herein, refer to each of the regions of an antibody variable domain which are hypervariable in sequence and/or form structurally defined loops (hypervariable loops) and/or contain the antigen-contacting residues. Antibodies can comprise six CDRs, e.g., three in the VH and three in the VL.

[0099] The terms “VL”, “VL region,” and “VL domain” are used herein interchangeably to refer to the light chain variable region of an antigen binding polypeptide, antigen binding polypeptide complex, antibody or antigen binding fragment thereof. In some aspects, a VL region is referred to herein as VL1 to denote a first light chain variable region, VL2 to denote a second light chain variable region, VL3 to denote a third light chain variable region, VL4 to denote a fourth light chain variable region, and so on. An enumerated VL region (e.g., VL1) can have the same or different antigen binding properties and/or the same or different sequence as another enumerated VL region (e.g., VL2).

[0100] The terms “VH”, “VH region,” and “VH domain” are used herein interchangeably to refer to the heavy chain variable region of an antigen binding polypeptide, antigen binding polypeptide complex, antibody or antigen binding fragment thereof. In some aspects, a VH region is referred to herein as VH1 to denote a first heavy chain variable region, VH2 to denote a second heavy chain variable region, VH3 to denote a third heavy chain variable region, VH4 to denote a fourth heavy chain variable region, and so on. An enumerated VH region (e.g., VH1) can have the same or different antigen binding properties and/or the same or different sequence as another enumerated VH region (e.g., VH2).

[0101] As used herein, “Kabat numbering” and like terms are recognized in the art and refer to a system of numbering amino acid residues in the heavy and light chain variable regions of an antibody or antigen binding fragment thereof. In some aspects, CDRs can be determined according to the Kabat numbering system (see, e.g., Kabat E A & Wu T T (1971) Ann NY Acad Sci 190: 382-391 and Kabat E A et al., (1991) Sequences of Proteins of Immunological Interest, Fifth Edition, U.S. Department of Health and Human Services, NIH Publication No. 91-3242). Using the Kabat numbering system, CDRs within an antibody heavy chain molecule are typically present at amino acid positions 31 to 35, which optionally can include one or two additional amino acids, following 35 (referred to in the Kabat numbering scheme as 35A and 35B) (CDR1), amino acid positions 50 to 65 (CDR2), and amino acid positions 95 to 102 (CDR3). Using the Kabat numbering system, CDRs within an antibody light chain molecule are typically present at amino acid positions 24 to 34 (CDR1), amino acid positions 50 to 56 (CDR2), and amino acid positions 89 to 97 (CDR3).

[0102] As used herein, the terms “constant region” or “constant domain” are used interchangeably to refer to a portion of an antigen binding polypeptide, antigen binding polypeptide complex, antibody or antigen binding fragment thereof, e.g., a carboxyl terminal portion of a light and/or heavy chain which is not directly involved in binding of an antibody to antigen but which can exhibit various effector functions, such as interaction with the Fc region. The constant region generally has a more conserved amino acid sequence relative to a variable region. In some aspects, an antigen binding polypeptide, antigen binding polypeptide complex, antibody or antigen binding fragment thereof comprises a constant region or portion thereof that is sufficient for antibody-dependent cell-mediated cytotoxicity (ADCC), antibody-dependent cellular phagocytosis (ADCP), and complement-dependent cytotoxicity (CDC).

[0103] As used herein, the terms “fragment crystallizable region,” “Fc region,” or “Fc domain” are used interchangeably herein to refer to the tail region of an antibody that interacts with cell surface receptors called Fc receptors and some proteins of the complement system. Fc regions typically comprise CH2 and CH3 regions, and, optionally, an immunoglobulin hinge. Examples of an Fc region include, but are not limited to, an amino acid sequence of any one of SEQ ID NOs:391-404, or an amino acid sequence having at least 80%, at least 85%, at least 90%, at least 95%, at least 96%, at least 97%, at least 98%, or at least 99% identity to any one of SEQ ID NOs:391-404. Examples of a CH2 region include, but are not limited to, an amino acid sequence of any one of SEQ ID NOs:410-415, or an amino acid sequence having at least 80%, at least 85%, at least 90%, at least 95%, at least 96%, at least 97%, at least 98%, or at least 99% identity to any one of SEQ ID NOs:410-415. Examples of a CH3 region include, but are not limited to, an amino acid sequence of any one of SEQ ID NOs:416-419, or an amino acid sequence having at least 80%, at least 85%, at least 90%, at least 95%, at least 96%, at least 97%, at least 98%, or at least 99% identity to any one of SEQ ID NOs:416-419.

[0104] As used herein, the terms “immunoglobulin hinge,” “hinge,” “hinge domain” or “hinge region” are used interchangeably to refer to a stretch of heavy chains between the Fab and Fc portions of an antigen binding polypeptide, antigen binding polypeptide complex, antibody or antigen binding fragment thereof. A hinge provides structure, position and flexibility, which assist with normal functioning of antibodies (e.g., for crosslinking two antigens or binding two antigenic determinants on the same antigen molecule). An immunoglobulin hinge is divided into upper, middle and lower hinge regions that can be separated based on structural and/or genetic components. An immunoglobulin hinge of the invention can contain one, two or all three of these regions. Structurally, the upper hinge region stretches from the C terminal end of CH1 to the first hinge disulfide bond. The middle hinge region stretches from the first cysteine to the last cysteine in the hinge. The lower hinge region extends from the last cysteine to the glycine of CH2. The cysteines present in the hinge form interchain disulfide bonds that link the immunoglobulin monomers.

[0105] As used herein, the term “Fab” refers to a region of an antibody that binds to an antigen. It is typically composed of one constant and one variable domain of each of the heavy and the light chain.

[0106] As used herein, the term “heavy chain” refers to a portion of an antigen binding polypeptide, antigen binding polypeptide complex, antibody or antigen binding fragment thereof typically composed of a heavy chain variable region (VH), a heavy chain constant region 1 (CH1), a heavy chain constant region 2 (CH2), and a heavy chain constant region 3 (CH3). A typical antibody is composed of two heavy chains and two light chains. When used in reference to an antibody, a heavy chain can refer to any distinct type, e.g., alpha (α), delta (δ), epsilon (ε), gamma (γ), and mu (μ), based on the amino acid sequence of the constant region, which gives rise to IgA, IgD, IgE, IgG, and IgM classes of antibodies, respectively, including subclasses of IgG, e.g., IgG1, IgG2, IgG3, and IgG4. Heavy chain amino acid sequences are known in the art. In some aspects, the heavy chain is a human heavy chain.

[0107] As used herein, the term “light chain” refers to a portion of an antigen binding polypeptide, antigen binding polypeptide complex, antibody or antigen binding fragment thereof typically composed of a light chain variable region (VL) and a light chain constant region (CL). A typical antibody is composed of two light chains and two heavy chains. When used in reference to an antibody, a light chain can refer to any distinct type, e.g., kappa (κ) or lambda (λ), based on the amino acid sequence of the constant region. Light chain amino acid sequences are known in the art. In some aspects, the light chain is a human light chain.

[0108] The term “chimeric” antibody or antigen binding fragment thereof refers to an antibody or antigen binding fragments thereof wherein the amino acid sequence is derived from two or more species. Typically, the variable region of both light and heavy chains corresponds to the variable region of antibodies or antigen binding fragments thereof derived from one species of mammals (e.g., mouse, rat, rabbit, etc.) with the desired specificity, affinity and capability, while the constant regions are homologous to the sequences in antibodies or antigen binding fragments thereof derived from another (usually human) to avoid eliciting an immune response in that species.

[0109] The term “humanized” antibody or antigen binding fragment thereof refers to forms of non-human (e.g., murine) antibodies or antigen binding fragments that are specific immunoglobulin chains, chimeric immunoglobulins, or fragments thereof that contain minimal non-human (e g, murine) sequences. Typically, humanized antibodies or antigen binding fragments thereof are human immunoglobulins in which residues from a complementary determining region (CDR) are replaced by residues from a CDR of a non-human species (e.g., mouse, rat, rabbit, hamster) that have the desired specificity, affinity, and capability (Jones et al., Nature 321:522-525 (1986); Riechmann et al., Nature 332:323-327 (1988); Verhoeyen et al., Science 239:1534-1536 (1988)). In some aspects, the Fv framework region (FR) residues of a human immunoglobulin are replaced with the corresponding residues in an antibody or fragment from a non-human species that has the desired specificity, affinity, and capability. The humanized antibody or antigen binding fragment thereof can be further modified by the substitution of additional residues either in the Fv framework region and/or within the replaced non-human residues to refine and optimize antibody or antigen-binding fragment thereof specificity, affinity, and/or capability. In general, a humanized antibody or antigen binding fragment thereof will comprise substantially all of at least one, and typically two or three, variable domains containing all or substantially all of the CDR regions that correspond to the non-human immunoglobulin whereas all or substantially all of the FR regions are those of a human immunoglobulin consensus sequence. A humanized antibody or antigen binding fragment thereof can also comprise at least a portion of a constant region, typically that of a human immunoglobulin. Examples of methods used to generate humanized antibodies are known and described, for example, in U.S. Pat. No. 5,225,539; Roguska et al., Proc. Natl. Acad. Sci., USA, 91(3):969-973 (1994), and Roguska et al., Protein Eng. 9(10):895-904 (1996).

[0110] The term “human” antibody or antigen binding fragment thereof, as used herein, means an antibody or antigen binding fragment thereof having an amino acid sequence derived from a human immunoglobulin gene locus, where such antibody or antigen binding fragment is made using recombinant techniques known in the art. This definition of a human antibody or antigen binding fragment thereof includes intact or full-length antibodies and fragments thereof.

[0111] A polypeptide, polypeptide complex, antibody, antigen binding fragment thereof, polynucleotide, vector or host cell which is “isolated” is a polypeptide, polypeptide complex, antibody, antigen binding fragment thereof, polynucleotide, vector or host cell which is in a form not found in nature. Isolated polypeptides, polypeptide complexes, antibodies, antigen binding fragments thereof, polynucleotides, vectors or host cells include those which have been purified to a degree that they are no longer in a form in which they are found in nature. In some aspects, a polypeptide, polypeptide complex, antibody, antigen binding fragment thereof, polynucleotide, vector or host cell which is isolated is substantially pure. As used herein, “substantially pure” refers to material which is at least 50% pure (i.e., free from contaminants), at least 90% pure, at least 95% pure, at least 98% pure, or at least 99% pure.

[0112] The terms “polypeptide,” “peptide,” and “protein” are used interchangeably herein to refer to polymers of amino acids of any length. The polymer can be linear or branched, it can comprise modified amino acids, and it can be interrupted by non-amino acids. The terms also encompass an amino acid polymer that has been modified naturally or by intervention; for example, disulfide bond formation, glycosylation, lipidation, acetylation, phosphorylation, or any other manipulation or modification, such as conjugation with a labeling component. Also included within the definition are, for example, polypeptides containing one or more analogs of an amino acid (including, for example, unnatural amino acids, etc.), as well as other modifications known in the art. It is understood that, because the polypeptides of this invention are based upon antibodies, in some aspects, the polypeptides can occur as single chains or associated chains.

[0113] The use of the alternative (e.g., “or”) should be understood to mean either one, both, or any combination thereof of the alternatives. As used herein, the indefinite articles “a” or “an” should be understood to refer to “one or more” of any recited or enumerated component.

[0114] As used herein, the term “and/or” is to be taken as specific disclosure of each of the two specified features or components with or without the other. Thus, the term “and/or” as used in a phrase such as “A and/or B” herein is intended to include “A and B,” “A or B,” “A” (alone), and “B” (alone). Likewise, the term “and/or” as used in a phrase such as “A, B, and/or C” is intended to encompass each of the following aspects: A, B, and C; A, B, or C; A or C; A or B; B or C; A and C; A and B; B and C; A (alone); B (alone); and C (alone).

[0115] It is understood that wherever aspects are described herein with the language “comprising,” “having,” or the like, otherwise analogous aspects described in terms of “consisting of” and/or “consisting essentially of” are also provided.

[0116] As used herein, the term “about” refers to a value or composition that is within an acceptable error range for the particular value or composition as determined by one of ordinary skill in the art, which will depend in part on how the value or composition is measured or determined, i.e., the limitations of the measurement system. For example, “about” can mean within 1 or more than 1 standard deviation per the practice in the art. Alternatively, “about” can mean a range of up to 10% or 20% (i.e., ±10% or ±20%). For example, about 3 mg can include any number between 2.7 mg and 3.3 mg (for 10%) or between 2.4 mg and 3.6 mg (for 20%). Furthermore, particularly with respect to biological systems or processes, the terms can mean up to an order of magnitude or up to 5-fold of a value. When particular values or compositions are provided in the application and claims, unless otherwise stated, the meaning of “about” should be assumed to be within an acceptable error range for that particular value or composition.

[0117] As described herein, any numerical range, concentration range, percentage range, ratio range or integer range is to be understood to include the value of any integer within the recited range and, when appropriate, fractions thereof (such as one-tenth and one-hundredth of an integer), unless otherwise indicated.

[0118] Unless defined otherwise, all technical and scientific terms used herein have the same meaning as commonly understood by one of ordinary skill in the art to which this disclosure is related. For example, the Concise Dictionary of Biomedicine and Molecular Biology, Juo, Pei-Show, 2nd ed., 2002, CRC Press; The Dictionary of Cell and Molecular Biology, 5th ed., 2013, Academic Press; and the Oxford Dictionary Of Biochemistry And Molecular Biology, 2006, Oxford University Press, provide one of skill with a general dictionary of many of the terms used in this disclosure.

[0119] Units, prefixes, and symbols are denoted in their Système International de Unites (SI) accepted form. Numeric ranges are inclusive of the numbers defining the range. The headings provided herein are not limitations of the various aspects of the disclosure, which can be had by reference to the specification as a whole. Accordingly, the terms defined herein are more fully defined by reference to the specification in its entirety.

[0120] Various aspects are described in further detail in the following sections.

### Antigen Binding Polypeptides and Antigen Binding Polypeptide Complexes

[0121] In some aspects, the invention is directed to antigen binding polypeptides and antigen binding polypeptide complexes having certain structural features.

[0122] In some aspects, the invention is directed to antigen binding polypeptides and antigen binding polypeptide complexes having a structure represented by VL1-VL2-VH2-VH1 or VH1-VH2-VL2-VL1. In some aspects, the antigen binding polypeptide or antigen binding polypeptide complex contains an amino acid linker between any two regions denoted in a structure described herein. In some aspects, the antigen binding polypeptide or antigen binding polypeptide complex can contain an Fc region, CH1 region, CL region, CH3 region or any combination thereof. In some aspects, the Fc region, CH1 region, CL region and/or CH3 is located at the carboxy terminus of the antigen binding polypeptide, and is optionally linked to polypeptide by at least one amino acid linker In some aspects, the Fc region comprises an amino acid sequence of any one of SEQ ID NOs:391-404 or an amino acid sequence having at least 80%, at least 85%, at least 90%, at least 95%, at least 96%, at least 97%, at least 98%, or at least 99% identity to any one of SEQ ID NOs:391-404. In some aspects, the CH1 region comprises an amino acid sequence of any one of SEQ ID NOs:405-409 or an amino acid sequence having at least 80%, at least 85%, at least 90%, at least 95%, at least 96%, at least 97%, at least 98%, or at least 99% identity to any one of SEQ ID NOs:405-409. In some aspects, the CL region comprises an amino acid sequence of SEQ ID NO:420 or 421 or an amino acid sequence having at least 80%, at least 85%, at least 90%, at least 95%, at least 96%, at least 97%, at least 98% or at least 99% identity to SEQ ID NO:420 or 421. In some aspects, the antigen binding polypeptide complex is an antibody or antigen binding fragment thereof.

[0123] In some aspects, the antigen binding polypeptide has a structure represented by VL1-VL2-VH2-VH1; VH1-VH2-VL2-VL1; VL1-L1-VL2-L2-VH2-L3-VH1; or VH1-L1-VH2-L2-VL2-L3-VL1; wherein VL1 is a first immunoglobulin light chain variable region; VL2 is a second immunoglobulin light chain variable region; VH1 is a first immunoglobulin heavy chain variable region; VH2 is a second immunoglobulin heavy chain variable region; and L1, L2 and L3 are amino acid linkers. In some aspects, the antigen binding polypeptide has the structure represented by VL1-VL2-VH2-VH1. In some aspects, the antigen binding polypeptide has the structure represented by VH1-VH2-VL2-VL1. In some aspects, the antigen binding polypeptide has the structure represented by VL1-L1-VL2-L2-VH2-L3-VH1. In some aspects, the antigen binding polypeptide has the structure represented by VH1-L1-VH2-L2-VL2-L3-VL1.

[0124] In some aspects, the antigen binding polypeptide complex comprises a first polypeptide and a second polypeptide; wherein the first polypeptide has a structure represented by VL1-VL2-VH2-VH1; VH1-VH2-VL2-VL1; VL1-L1-VL2-L2-VH2-L3-VH1; or VH1-L1-VH2-L2-VL2-L3-VL1; wherein the second polypeptide has a structure represented by VL1-VL2-VH2-VH1; VH1-VH2-VL2-VL1; VL1-L1-VL2-L2-VH2-L3-VH1; or VH1-L1-VH2-L2-VL2-L3-VL1; wherein VL1 is a first immunoglobulin light chain variable region; VL2 is a second immunoglobulin light chain variable region; VH1 is a first immunoglobulin heavy chain variable region; VH2 is a second immunoglobulin heavy chain variable region; and L1, L2 and L3 are amino acid linkers. In some aspects, the first polypeptide has a structure represented by VL1-VL2-VH2-VH1, and the second polypeptide has a structure represented by VL1-VL2-VH2-VH1; VH1-VH2-VL2-VL1; VL1-L1-VL2-L2-VH2-L3-VH1; or VH1-L1-VH2-L2-VL2-L3-VL1. In some aspects, the first polypeptide has a structure represented by VH1-VH2-VL2-VL1, and the second polypeptide has a structure represented by VL1-VL2-VH2-VH1; VH1-VH2-VL2-VL1; VL1-L1-VL2-L2-VH2-L3-VH1; or VH1-L1-VH2-L2-VL2-L3-VL1. In some aspects, the first polypeptide has a structure represented by VL1-L1-VL2-L2-VH2-L3-VH1, and the second polypeptide has a structure represented by VL1-VL2-VH2-VH1; VH1-VH2-VL2-VL1; VL1-L1-VL2-L2-VH2-L3-VH1; or VH1-L1-VH2-L2-VL2-L3-VL1. In some aspects, the first polypeptide has a structure represented by VH1-L1-VH2-L2-VL2-L3-VL1, and the second polypeptide has a structure represented by VL1-VL2-VH2-VH1; VH1-VH2-VL2-VL1; VL1-L1-VL2-L2-VH2-L3-VH1; or VH1-L1-VH2-L2-VL2-L3-VL1.

[0125] In some aspects, the antigen binding polypeptide further comprises at least one Fc region which is optionally positioned at its carboxy terminus. The Fc region can be linked to the polypeptide via at least one amino acid linker. For example, the antigen binding polypeptide may have a structure represented by VL1-VL2-VH2-VH1-Fc; VH1-VH2-VL2-VL1-Fc; VL1-L1-VL2-L2-VH2-L3-VH1-Fc; VH1-L1-VH2-L2-VL2-L3-VL1-Fc; VL1-L1-VL2-L2-VH2-L3-VH1-L4-Fc; or VH1-L1-VH2-L2-VL2-L3-VL1-L4-Fc; wherein VL1 is a first immunoglobulin light chain variable region; VL2 is a second immunoglobulin light chain variable region; VH1 is a first immunoglobulin heavy chain variable region; VH2 is a second immunoglobulin heavy chain variable region; Fc is a region comprising an immunoglobulin heavy chain constant region 2 (CH2), an immunoglobulin heavy chain constant region 3 (CH3), and optionally, an immunoglobulin hinge; and L1, L2, L3 and L4 are amino acid linkers.

[0126] In some aspects, the antigen binding polypeptide complex as defined herein further comprises at least one Fc region, which is optionally positioned at the carboxy terminus of the first polypeptide and/or second polypeptide. The Fc region can be linked to the first polypeptide and/or second polypeptide via at least one amino acid linker. For example, the antigen binding complex may comprise a first polypeptide and a second polypeptide, wherein the first polypeptide has a structure represented by VL1-VL2-VH2-VH1-Fc; VH1-VH2-VL2-VL1-Fc; VL1-L1-VL2-L2-VH2-L3-VH1-Fc; VH1-L1-VH2-L2-VL2-L3-VL1-Fc; VL1-L1-VL2-L2-VH2-L3-VH1-L4-Fc; or VH1-L1-VH2-L2-VL2-L3-VL1-L4-Fc; wherein the second polypeptide has a structure represented by Fc; VL1-VL2-VH2-VH1-Fc; VH1-VH2-VL2-VL1-Fc; VL1-L1-VL2-L2-VH2-L3-VH1-Fc; VH1-L1-VH2-L2-VL2-L3-VL1-Fc; VL1-L1-VL2-L2-VH2-L3-VH1-L4-Fc; or VH1-L1-VH2-L2-VL2-L3-VL1-L4-Fc; wherein VL1 is a first immunoglobulin light chain variable region; VL2 is a second immunoglobulin light chain variable region; VH1 is a first immunoglobulin heavy chain variable region; VH2 is a second immunoglobulin heavy chain variable region; Fc is a region comprising an immunoglobulin heavy chain constant region 2 (CH2), an immunoglobulin heavy chain constant region 3 (CH3), and optionally, an immunoglobulin hinge; and L1, L2, L3 and L4 are amino acid linkers. In some aspects, the first polypeptide has a structure represented by VL1-VL2-VH2-VH1-Fc and the second polypeptide has a structure represented by Fc; VL1-VL2-VH2-VH1-Fc; VH1-VH2-VL2-VL1-Fe; VL1-L1-VL2-L2-VH2-L3-VH1-Fc; VH1-L1-VH2-L2-VL2-L3-VL1-Fc; VL1-L1-VL2-L2-VH2-L3-VH1-L4-Fc; or VH1-L1-VH2-L2-VL2-L3-VL1-L4-Fc. In some aspects, the first polypeptide has a structure represented by VH1-VH2-VL2-VL1-Fc and the second polypeptide has a structure represented by Fc; VL1-VL2-VH2-VH1-Fc; VH1-VH2-VL2-VL1-Fc; VL1-L1-VL2-L2-VH2-L3-VH1-Fe; VH1-L1-VH2-L2-VL2-L3-VL1-Fc; VL1-L1-VL2-L2-VH2-L3-VH1-L4-Fc; or VH1-L1-VH2-L2-VL2-L3-VL1-L4-Fc. In some aspects, the first polypeptide has a structure represented by VL1-L1-VL2-L2-VH2-L3-VH1-Fe and the second polypeptide has a structure represented by Fc; VL1-VL2-VH2-VH1-Fc; VH1-VH2-VL2-VL1-Fc; VL1-L1-VL2-L2-VH2-L3-VH1-Fc; VH1-L1-VH2-L2-VL2-L3-VL1-Fc; VL1-L1-VL2-L2-VH2-L3-VH1-L4-Fc; or VH1-L1-VH2-L2-VL2-L3-VL1-L4-Fc. In some aspects, the first polypeptide has a structure represented by VH1-L1-VH2-L2-VL2-L3-VL1-Fc and the second polypeptide has a structure represented by Fc; VL1-VL2-VH2-VH1-Fe; VH1-VH2-VL2-VL1-Fe; VL1-L1-VL2-L2-VH2-L3-VH1-Fc; VH1-L1-VH2-L2-VL2-L3-VL1-Fc; VL1-L1-VL2-L2-VH2-L3-VH1-L4-Fe; or VH1-L1-VH2-L2-VL2-L3-VL1-L4-Fc. In some aspects, the first polypeptide has a structure represented by VL1-L1-VL2-L2-VH2-L3-VH1-L4-Fc and the second polypeptide has a structure represented by Fc; VL1-VL2-VH2-VH1-Fc; VH1-VH2-VL2-VL1-Fc; VL1-L1-VL2-L2-VH2-L3-VH1-Fc; VH1-L1-VH2-L2-VL2-L3-VL1-Fc; VL1-L1-VL2-L2-VH2-L3-VH1-L4-Fc; or VH1-L1-VH2-L2-VL2-L3-VL1-L4-Fe. In some aspects, the first polypeptide has a structure represented by VH1-L1-VH2-L2-VL2-L3-VL1-L4-Fc and the second polypeptide has a structure represented by Fc; VL1-VL2-VH2-VH1-Fe; VH1-VH2-VL2-VL1-Fc; VL1-L1-VL2-L2-VH2-L3-VH1-Fc; VH1-L1-VH2-L2-VL2-L3-VL1-Fc; VL1-L1-VL2-L2-VH2-L3-VH1-L4-Fc; or VH1-L1-VH2-L2-VL2-L3-VL1-L4-Fe.

[0127] In some aspects, the antigen binding polypeptide further comprises at least one CH1 region and/or CL region which is optionally positioned at its carboxy terminus. In some aspects, the antigen binding polypeptide further comprises at its carboxy terminus the structure CH1-CL. In some aspects, the antigen binding polypeptide further comprises at its carboxy terminus the structure CL-CH1. The CH1 region and/or CL region can be linked to the polypeptide via at least one amino acid linker. When both the CH1 region and CL region are present, they can be linked to each other via at least one amino acid linker. For example, the antigen binding polypeptide may have a structure represented by VL1-VL2-VH2-VH1-CH1-CL; VH1-VH2-VL2-VL1-CH1-CL; VL1-VL2-VH2-VH1-CL-CH1; VH1-VH2-VL2-VL1-CL-CH1; VL1-L1-VL2-L2-VH2-L3-VH1-L4-CH1-CL; VH1-L1-VH2-L2-VL2-L3-VL1-L4-CH1-CL; VL1-L1-VL2-L2-VH2-L3-VH1-L4-CL-CH1; VH1-L1-VH2-L2-VL2-L3-VL1-L4-CL-CH1; VL1-L1-VL2-L2-VH2- L3-VH1-L4-CH1-L5-CL; VH1-L1-VH2-L2-VL2-L3-VL1-L4-CH1-L5-CL; VL1-L1-VL2-L2-VH2-L3-VH1-L4-CL-L5-CH1; or VH1-L1-VH2-L2-VL2-L3-VL1-L4-CL-L5-CH1; wherein VL1 is a first immunoglobulin light chain variable region; VL2 is a second immunoglobulin light chain variable region; VH1 is a first immunoglobulin heavy chain variable region; VH2 is a second immunoglobulin heavy chain variable region; CH1 is an immunoglobulin heavy chain constant region 1; CL is an immunoglobulin light chain constant region; and L1, L2, L3, L4 and L5 are amino acid linkers.

[0128] In some aspects, the antigen binding polypeptide complex as defined herein further comprises at least one CH1 region and/or CL region, which is optionally positioned at the carboxy terminus of the first polypeptide and/or second polypeptide. For example, the carboxy terminus of the first polypeptide and/or second polypeptide may comprise a CH1 region. For example, the carboxy terminus of the first polypeptide and/or second polypeptide may comprise a CL region. For example, the carboxy terminus of the first polypeptide and/or second polypeptide may comprise both a CH1 and a CL region. In some aspects, the carboxy terminus of the first polypeptide and/or second polypeptide comprises the structure CH1-CL. In some aspects, the carboxy terminus of the first polypeptide and/or second polypeptide comprises the structure CL-CH1. The CH1 region and/or CL region can be linked to the first polypeptide and/or second polypeptide via at least one amino acid linker. When both the CH1 region and CL region are present, they can be linked to each other via at least one amino acid linker. For example, the antigen binding complex may comprise a first polypeptide and a second polypeptide; wherein the first polypeptide has a structure represented by VL1-VL2-VH2-VH1-CH1; VH1-VH2-VL2-VL1-CH1; VL1-VL2-VH2-VH1-CL; VH1-VH2-VL2-VL1-CL; VL1-VL2-VH2-VH1-CH1-CL; VH1-VH2-VL2-VL1-CH1-CL; VL1-VL2-VH2-VH1-CL-CH1; VH1-VH2-VL2-VL1-CL-CH1; VL1-L1-VL2-L2-VH2-L3-VH1-L4-CH1; VH1-L1-VH2-L2-VL2-L3-VL1-L4-CH1; VL1-L1-VL2-L2-VH2-L3-VH1-L4-CL; VH1-L1-VH2-L2-VL2- L3-VL1-L4-CL; VL1-L1-VL2-L2-VH2-L3-VH1-L4-CH1-L5-CL; VH1-L1-VH2-L2-VL2-L3-VL1-L4-CH1-L5-CL; VL1-L1-VL2-L2-VH2-L3-VH1-L4-CL-L5-CH1; or VH1-L1-VH2-L2-VL2-L3-VL1-L4-CL-L5-CH1; wherein the second polypeptide has a structure represented by VL1-VL2-VH2-VH1-CH1; VL1-VL2-VH2-VH1-CH1; VH1-VH2-VL2-VL1-CH1; VL1-VL2-VH2-VH1-CL; VH1-VH2-VL2-VL1-CL; VL1-VL2-VH2-VH1-CH1-CL; VH1-VH2-VL2-VL1-CH1-CL; VL1-VL2-VH2-VH1-CL-CH1; VH1-VH2-VL2-VL1-CL-CH1; VL1-L1-VL2-L2-VH2-L3-VH1-L4-CH1; VH1-L1-VH2-L2-VL2-L3-VL1-L4-CH1; VL1-L1-VL2-L2-VH2-L3-VH1-L4-CL; VH1-L1-VH2-L2-VL2-L3-VL1-L4-CL; VL1-L1-VL2-L2-VH2-L3-VH1-L4-CH1-L5-CL; VH1-L1-VH2-L2-VL2-L3-VL1-L4-CH1-L5-CL; VL1-L1-VL2-L2- VH2-L3-VH1-L4-CL-L5-CH1; or VH1-L1-VH2-L2-VL2-L3-VL1-L4-CL-L5-CH1; wherein VL1 is a first immunoglobulin light chain variable region; VL2 is a second immunoglobulin light chain variable region; VH1 is a first immunoglobulin heavy chain variable region; VH2 is a second immunoglobulin heavy chain variable region; CH1 is an immunoglobulin heavy chain constant region 1; CL is a light chain constant region; and L1, L2, L3, L4 and L5 are amino acid linkers. In some aspects, the first polypeptide has a structure represented by VL1-VL2-VH2-VH1-CH1 and the second polypeptide has a structure represented by VL1-VL2-VH2-VH1-CH1; VL1-VL2-VH2-VH1-CH1; VH1-VH2-VL2-VL1-CH1; VL1-VL2-VH2-VH1-CL; VH1-VH2-VL2-VL1-CL; VL1-VL2-VH2-VH1-CH1-CL; VH1-VH2-VL2-VL1-CH1-CL; VL1-VL2-VH2-VH1-CL-CH1; VH1-VH2-VL2-VL1-CL-CH1; VL1-L1-VL2-L2-VH2-L3-VH1-L4-CH1; VH1-L1-VH2-L2-VL2-L3-VL1-L4-CH1; VL1-L1-VL2-L2-VH2-L3-VH1-L4-CL; VH1-L1-VH2-L2-VL2-L3-VL1-L4-CL; VL1-L1- VL2-L2-VH2-L3-VH1-L4-CH1-L5-CL; VH1-L1-VH2-L2-VL2-L3-VL1-L4-CH1-L5-CL; VL1-L1-VL2-L2-VH2-L3- VH1-L4-CL-L5-CH1; or VH1-L1-VH2-L2-VL2-L3-VL1-L4-CL-L5-CH1. In some aspects, the first polypeptide has a structure represented by VH1-VH2-VL2-VL1-CH1 and the second polypeptide has a structure represented by VL1-VL2-VH2-VH1-CH1; VL1-VL2-VH2-VH1-CH1; VH1-VH2-VL2-VL1-CH1; VL1-VL2-VH2-VH1-CL; VH1-VH2-VL2-VL1-CL; VL1-VL2-VH2-VH1-CH1-CL; VH1-VH2-VL2-VL1-CH1-CL; VL1-VL2-VH2-VH1-CL-CH1; VH1-VH2-VL2-VL1-CL-CH1; VL1-L1-VL2-L2-VH2-L3-VH1-L4-CH1; VH1-L1-VH2-L2-VL2-L3-VL1-L4-CH1; VL1-L1- VL2-L2-VH2-L3-VH1-L4-CL; VH1-L1-VH2-L2-VL2-L3-VL1-L4-CL; VL1-L1-VL2-L2-VH2-L3-VH1-L4-CH1-L5- CL; VH1-L1-VH2-L2-VL2-L3-VL1-L4-CH1-L5-CL; VL1-L1-VL2-L2-VH2-L3-VH1-L4-CL-L5-CH1; or VH1-L1-VH2-L2-VL2-L3-VL1-L4-CL-L5-CH1. In some aspects, the first polypeptide has a structure represented by VL1-VL2-VH2-VH1-CL and the second polypeptide has a structure represented by VL1-VL2-VH2-VH1-CH1; VL1-VL2-VH2-VH1-CH1; VH1-VH2-VL2-VL1-CH1; VL1-VL2-VH2-VH1-CL; VH1-VH2-VL2-VL1-CL; VL1-VL2-VH2-VH1-CH1-CL; VH1-VH2-VL2-VL1-CH1-CL; VL1-VL2-VH2-VH1-CL-CH1; VH1-VH2-VL2-VL1-CL-CH1; VL1-L1-VL2-L2-VH2-L3-VH1-L4-CH1; VH1-L1-VH2-L2-VL2-L3-VL1-L4-CH1; VL1-L1-VL2-L2-VH2-L3-VH1-L4-CL; VH1-L1- VH2-L2-VL2-L3-VL1-L4-CL; VL1-L1-VL2-L2-VH2-L3-VH1-L4-CH1-L5-CL; VH1-L1-VH2-L2-VL2-L3-VL1-L4-CH1- L5-CL; VL1-L1-VL2-L2-VH2-L3-VH1-L4-CL-L5-CH1; or VH1-L1-VH2-L2-VL2-L3-VL1-L4-CL-L5-CH1. In some aspects, the first polypeptide has a structure represented by VH1-VH2-VL2-VL1-CL and the second polypeptide has a structure represented by VL1-VL2-VH2-VH1-CH1; VL1-VL2-VH2-VH1-CH1; VH1-VH2-VL2-VL1-CH1; VL1-VL2-VH2-VH1-CL; VH1-VH2-VL2-VL1-CL; VL1-VL2-VH2-VH1-CH1-CL; VH1-VH2-VL2-VL1-CH1-CL; VL1-VL2-VH2-VH1-CL-CH1; VH1-VH2-VL2-VL1-CL-CH1; VL1-L1-VL2-L2-VH2-L3-VH1-L4-CH1; VH1-L1-VH2-L2-VL2-L3-VL1-L4-CH1; VL1-L1-VL2-L2-VH2-L3-VH1-L4-CL; VH1-L1-VH2-L2-VL2-L3-VL1-L4-CL; VL1-L1-VL2- L2-VH2-L3-VH1-L4-CH1-L5-CL; VH1-L1-VH2-L2-VL2-L3-VL1-L4-CH1-L5-CL; VL1-L1-VL2-L2-VH2-L3-VH1- L4-CL-L5-CH1; or VH1-L1-VH2-L2-VL2-L3-VL1-L4-CL-L5-CH1. In some aspects, the first polypeptide has a structure represented by VL1-VL2-VH2-VH1-CH1-CL and the second polypeptide has a structure represented by VL1-VL2-VH2-VH1-CH1; VL1-VL2-VH2-VH1-CH1; VH1-VH2-VL2-VL1-CH1; VL1-VL2-VH2-VH1-CL; VH1-VH2-VL2-VL1-CL; VL1-VL2-VH2-VH1-CH1-CL; VH1-VH2-VL2-VL1-CH1-CL; VL1-VL2-VH2-VH1-CL-CH1; VH1-VH2-VL2-VL1-CL-CH1; VL1-L1-VL2-L2-VH2-L3-VH1-L4-CH1; VH1-L1-VH2-L2-VL2-L3-VL1-L4-CH1; VL1-L1- VL2-L2-VH2-L3-VH1-L4-CL; VH1-L1-VH2-L2-VL2-L3-VL1-L4-CL; VL1-L1-VL2-L2-VH2-L3-VH1-L4-CH1-L5- CL; VH1-L1-VH2-L2-VL2-L3-VL1-L4-CH1-L5-CL; VL1-L1-VL2-L2-VH2-L3-VH1-L4-CL-L5-CH1; or VH1-L1-VH2-L2-VL2-L3-VL1-L4-CL-L5-CH1. In some aspects, the first polypeptide has a structure represented by VH1-VH2-VL2-VL1-CH1-CL and the second polypeptide has a structure represented by VL1-VL2-VH2-VH1-CH1; VL1-VL2-VH2-VH1-CH1; VH1-VH2-VL2-VL1-CH1; VL1-VL2-VH2-VH1-CL; VH1-VH2-VL2-VL1-CL; VL1-VL2-VH2-VH1-CH1-CL; VH1-VH2-VL2-VL1-CH1-CL; VL1-VL2-VH2-VH1-CL-CH1; VH1-VH2-VL2-VL1-CL-CH1; VL1-L1-VL2-L2-VH2-L3-VH1-L4-CH1; VH1-L1-VH2-L2-VL2-L3-VL1-L4-CH1; VL1-L1-VL2-L2-VH2-L3-VH1-L4-CL; VH1- L1-VH2-L2-VL2-L3-VL1-L4-CL; VL1-L1-VL2-L2-VH2-L3-VH1-L4-CH1-L5-CL; VH1-L1-VH2-L2-VL2-L3-VL1- L4-CH1-L5-CL; VL1-L1-VL2-L2-VH2-L3-VH1-L4-CL-L5-CH1; or VH1-L1-VH2-L2-VL2-L3-VL1-L4-CL-L5-CH1. In some aspects, the first polypeptide has a structure represented by VL1-VL2-VH2-VH1-CL-CH1 and the second polypeptide has a structure represented by VL1-VL2-VH2-VH1-CH1; VL1-VL2-VH2-VH1-CH1; VH1-VH2-VL2-VL1-CH1; VL1-VL2-VH2-VH1-CL; VH1-VH2-VL2-VL1-CL; VL1-VL2-VH2-VH1-CH1-CL; VH1-VH2-VL2-VL1-CH1-CL; VL1-VL2-VH2-VH1-CL-CH1; VH1-VH2-VL2-VL1-CL-CH1; VL1-L1-VL2-L2-VH2-L3-VH1-L4-CH1; VH1-L1-VH2-L2-VL2-L3-VL1-L4-CH1; VL1-L1-VL2-L2-VH2-L3-VH1-L4-CL; VH1-L1-VH2-L2-VL2-L3-VL1-L4-CL; VL1-L1-VL2-L2-VH2-L3-VH1-L4-CH1-L5-CL; VH1-L1-VH2-L2-VL2-L3-VL1-L4-CH1-L5-CL; VL1-L1-VL2-L2- VH2-L3-VH1-L4-CL-L5-CH1; or VH1-L1-VH2-L2-VL2-L3-VL1-L4-CL-L5-CH1. In some aspects, the first polypeptide has a structure represented by VH1-VH2-VL2-VL1-CL-CH1 and the second polypeptide has a structure represented by VL1-VL2-VH2-VH1-CH1; VL1-VL2-VH2-VH1-CH1; VH1-VH2-VL2-VL1-CH1; VL1-VL2-VH2-VH1-CL; VH1-VH2-VL2-VL1-CL; VL1-VL2-VH2-VH1-CH1-CL; VH1-VH2-VL2-VL1-CH1-CL; VL1-VL2-VH2-VH1-CL-CH1; VH1-VH2-VL2-VL1-CL-CH1; VL1-L1-VL2-L2-VH2-L3-VH1-L4-CH1; VH1-L1-VH2-L2-VL2-L3-VL1-L4-CH1; VL1-L1-VL2-L2-VH2-L3-VH1-L4-CL; VH1-L1-VH2-L2-VL2-L3-VL1-L4-CL; VL1-L1-VL2-L2-VH2-L3-VH1- L4-CH1-L5-CL; VH1-L1-VH2-L2-VL2-L3-VL1-L4-CH1-L5-CL; VL1-L1-VL2-L2-VH2-L3-VH1-L4-CL-L5-CH1; or VH1-L1-VH2-L2-VL2-L3-VL1-L4-CL-L5-CH1. In some aspects, the first polypeptide has a structure represented by VL1-L1-VL2-L2-VH2-L3-VH1-L4-CH1 and the second polypeptide has a structure represented by VL1-VL2-VH2-VH1-CH1; VL1-VL2-VH2-VH1-CH1; VH1-VH2-VL2-VL1-CH1; VL1-VL2-VH2-VH1-CL; VH1-VH2-VL2-VL1-CL; VL1-VL2-VH2-VH1-CH1-CL; VH1-VH2-VL2-VL1-CH1-CL; VL1-VL2-VH2-VH1-CL-CH1; VH1-VH2-VL2-VL1-CL-CH1; VL1-L1-VL2-L2-VH2-L3-VH1-L4-CH1; VH1-L1-VH2-L2-VL2-L3-VL1-L4-CH1; VL1-L1-VL2-L2- VH2-L3-VH1-L4-CL; VH1-L1-VH2-L2-VL2-L3-VL1-L4-CL; VL1-L1-VL2-L2-VH2-L3-VH1-L4-CH1-L5-CL; VH1-L1-VH2-L2-VL2-L3-VL1-L4-CH1-L5-CL; VL1-L1-VL2-L2-VH2-L3-VH1-L4-CL-L5-CH1; or VH1-L1-VH2-L2-VL2-L3-VL1-L4-CL-L5-CH1. In some aspects, the first polypeptide has a structure represented by VH1-L1-VH2-L2-VL2-L3-VL1-L4-CH1 and the second polypeptide has a structure represented by VL1-VL2-VH2-VH1-CH1; VL1-VL2-VH2-VH1-CH1; VH1-VH2-VL2-VL1-CH1; VL1-VL2-VH2-VH1-CL; VH1-VH2-VL2-VL1-CL; VL1-VL2-VH2-VH1-CH1-CL; VH1-VH2-VL2-VL1-CH1-CL; VL1-VL2-VH2-VH1-CL-CH1; VH1-VH2-VL2-VL1-CL-CH1; VL1-L1-VL2-L2-VH2-L3-VH1-L4-CH1; VH1-L1-VH2-L2-VL2-L3-VL1-L4-CH1; VL1-L1-VL2-L2-VH2-L3-VH1-L4-CL; VH1- L1-VH2-L2-VL2-L3-VL1-L4-CL; VL1-L1-VL2-L2-VH2-L3-VH1-L4-CH1-L5-CL; VH1-L1-VH2-L2-VL2-L3-VL1- L4-CH1-L5-CL; VL1-L1-VL2-L2-VH2-L3-VH1-L4-CL-L5-CH1; or VH1-L1-VH2-L2-VL2-L3-VL1-L4-CL-L5-CH1. In some aspects, the first polypeptide has a structure represented by VL1-L1-VL2-L2-VH2-L3-VH1-L4-CL and the second polypeptide has a structure represented by VL1-VL2-VH2-VH1-CH1; VL1-VL2-VH2-VH1-CH1; VH1-VH2-VL2-VL1-CH1; VL1-VL2-VH2-VH1-CL; VH1-VH2-VL2-VL1-CL; VL1-VL2-VH2-VH1-CH1-CL; VH1-VH2-VL2-VL1-CH1-CL; VL1-VL2-VH2-VH1-CL-CH1; VH1-VH2-VL2-VL1-CL-CH1; VL1-L1-VL2-L2-VH2-L3-VH1-L4-CH1; VH1-L1-VH2-L2-VL2-L3-VL1-L4-CH1; VL1-L1-VL2-L2-VH2-L3-VH1-L4-CL; VH1-L1-VH2-L2-VL2-L3-VL1-L4-CL; VL1-L1-VL2-L2-VH2-L3-VH1-L4-CH1-L5-CL; VH1-L1-VH2-L2-VL2-L3-VL1-L4-CH1-L5-CL; VL1-L1-VL2-L2- VH2-L3-VH1-L4-CL-L5-CH1; or VH1-L1-VH2-L2-VL2-L3-VL1-L4-CL-L5-CH1. In some aspects, the first polypeptide has a structure represented by VH1-L1-VH2-L2-VL2-L3-VL1-L4-CL and the second polypeptide has a structure represented by VL1-VL2-VH2-VH1-CH1; VL1-VL2-VH2-VH1-CH1; VH1-VH2-VL2-VL1-CH1; VL1-VL2-VH2-VH1-CL; VH1-VH2-VL2-VL1-CL; VL1-VL2-VH2-VH1-CH1-CL; VH1-VH2-VL2-VL1-CH1-CL; VL1-VL2-VH2-VH1-CL-CH1; VH1-VH2-VL2-VL1-CL-CH1; VL1-L1-VL2-L2-VH2-L3-VH1-L4-CH1; VH1-L1-VH2-L2-VL2-L3-VL1-L4-CH1; VL1-L1-VL2-L2-VH2-L3-VH1-L4-CL; VH1-L1-VH2-L2-VL2-L3-VL1-L4-CL; VL1-L1-VL2-L2-VH2-L3-VH1- L4-CH1-L5-CL; VH1-L1-VH2-L2-VL2-L3-VL1-L4-CH1-L5-CL; VL1-L1-VL2-L2-VH2-L3-VH1-L4-CL-L5-CH1; or VH1-L1-VH2-L2-VL2-L3-VL1-L4-CL-L5-CH1. In some aspects, the first polypeptide has a structure represented by VL1-L1-VL2-L2-VH2-L3-VH1-L4-CH1-L5-CL and the second polypeptide has a structure represented by VL1-VL2-VH2-VH1-CH1; VL1-VL2-VH2-VH1-CH1; VH1-VH2-VL2-VL1-CH1; VL1-VL2-VH2-VH1-CL; VH1-VH2-VL2-VL1-CL; VL1-VL2-VH2-VH1-CH1-CL; VH1-VH2-VL2-VL1-CH1-CL; VL1-VL2-VH2-VH1-CL-CH1; VH1-VH2-VL2-VL1-CL-CH1; VL1-L1-VL2-L2-VH2-L3-VH1-L4-CH1; VH1-L1-VH2-L2-VL2-L3-VL1-L4-CH1; VL1-L1- VL2-L2-VH2-L3-VH1-L4-CL; VH1-L1-VH2-L2-VL2-L3-VL1-L4-CL; VL1-L1-VL2-L2-VH2-L3-VH1-L4-CH1-L5- CL; VH1-L1-VH2-L2-VL2-L3-VL1-L4-CH1-L5-CL; VL1-L1-VL2-L2-VH2-L3-VH1-L4-CL-L5-CH1; or VH1-L1-VH2-L2-VL2-L3-VL1-L4-CL-L5-CH1. In some aspects, the first polypeptide has a structure represented by VH1-L1-VH2-L2-VL2-L3-VL1-L4-CH1-L5-CL and the second polypeptide has a structure represented by VL1-VL2-VH2-VH1-CH1; VL1-VL2-VH2-VH1-CH1; VH1-VH2-VL2-VL1-CH1; VL1-VL2-VH2-VH1-CL; VH1-VH2-VL2-VL1-CL; VL1-VL2-VH2-VH1-CH1-CL; VH1-VH2-VL2-VL1-CH1-CL; VL1-VL2-VH2-VH1-CL-CH1; VH1-VH2-VL2-VL1-CL-CH1; VL1-L1-VL2-L2-VH2-L3-VH1-L4-CH1; VH1-L1-VH2-L2-VL2-L3-VL1-L4-CH1; VL1-L1-VL2-L2-VH2-L3-VH1-L4-CL; VH1-L1-VH2-L2-VL2-L3-VL1-L4-CL; VL1-L1-VL2-L2-VH2-L3-VH1-L4-CH1-L5-CL; VH1-L1-VH2-L2-VL2-L3-VL1-L4-CH1-L5-CL; VL1-L1-VL2-L2-VH2-L3-VH1-L4-CL-L5-CH1; or VH1-L1-VH2-L2-VL2-L3-VL1-L4-CL-L5-CH1. In some aspects, the first polypeptide has a structure represented by VL1-L1-VL2-L2-VH2-L3-VH1-L4-CL-L5-CH1 and the second polypeptide has a structure represented by VL1-VL2-VH2-VH1-CH1; VL1-VL2-VH2-VH1-CH1; VH1-VH2-VL2-VL1-CH1; VL1-VL2-VH2-VH1-CL; VH1-VH2-VL2-VL1-CL; VL1-VL2-VH2-VH1-CH1-CL; VH1-VH2-VL2-VL1-CH1-CL; VL1-VL2-VH2-VH1-CL-CH1; VH1-VH2-VL2-VL1-CL-CH1; VL1-L1-VL2-L2-VH2-L3-VH1-L4-CH1; VH1-L1-VH2-L2-VL2-L3-VL1-L4-CH1; VL1-L1-VL2-L2-VH2-L3-VH1-L4-CL; VH1- L1-VH2-L2-VL2-L3-VL1-L4-CL; VL1-L1-VL2-L2-VH2-L3-VH1-L4-CH1-L5-CL; VH1-L1-VH2-L2-VL2-L3-VL1- L4-CH1-L5-CL; VL1-L1-VL2-L2-VH2-L3-VH1-L4-CL-L5-CH1; or VH1-L1-VH2-L2-VL2-L3-VL1-L4-CL-L5-CH1. In some aspects, the first polypeptide has a structure represented by VH1-L1-VH2-L2-VL2-L3-VL1-L4-CL-L5-CH1 and the second polypeptide has a structure represented by VL1-VL2-VH2-VH1-CH1; VL1-VL2-VH2-VH1-CH1; VH1-VH2-VL2-VL1-CH1; VL1-VL2-VH2-VH1-CL; VH1-VH2-VL2-VL1-CL; VL1-VL2-VH2-VH1-CH1-CL; VH1-VH2-VL2-VL1-CH1-CL; VL1-VL2-VH2-VH1-CL-CH1; VH1-VH2-VL2-VL1-CL-CH1; VL1-L1-VL2-L2-VH2-L3-VH1-L4-CH1; VH1-L1-VH2-L2-VL2-L3-VL1-L4-CH1; VL1-L1-VL2-L2-VH2-L3-VH1-L4-CL; VH1-L1-VH2-L2- VL2-L3-VL1-L4-CL; VL1-L1-VL2-L2-VH2-L3-VH1-L4-CH1-L5-CL; VH1-L1-VH2-L2-VL2-L3-VL1-L4-CH1-L5-CL; VL1-L1-VL2-L2-VH2-L3-VH1-L4-CL-L5-CH1; or VH1-L1-VH2-L2-VL2-L3-VL1-L4-CL-L5-CH1.

[0129] In some aspects, the antigen binding polypeptide further comprises at least two of an Fc region, a CH1 region and a CL region optionally positioned at its carboxy terminus. In some aspects, the antigen binding polypeptide further comprises at its carboxy terminus the structure CH1-Fc. In some aspects, the antigen binding polypeptide further comprises at its carboxy terminus the structure CL-Fc. In some aspects, the antigen binding polypeptide further comprises at its carboxy terminus the structure CL-CH1-Fc. In some aspects, the antigen binding polypeptide further comprises at its carboxy terminus the structure CH1-CL-Fc. The Fc region, CH1 region and/or CL region can be linked to the polypeptide via at least one amino acid linker. The Fc region, CH1 region and/or CL region can be linked to each other via at least one amino acid linker. For example, the C-terminal structure may have a structure represented by VL1-VL2-VH2-VH1-CH1-Fc; VH1-VH2-VL2-VL1-CH1-Fc; VL1-VL2-VH2-VH1-CL-Fc; VH1-VH2-VL2-VL1-CL-Fc; VL1-VL2-VH2-VH1-CH1-CL-Fc; VH1-VH2-VL2-VL1-CH1-CL-Fc; VL1-VL2-VH2-VH1-CL-CH1-Fc; VH1-VH2-VL2-VL1-CL-CH1-Fc; VL1-L1-VL2-L2-VH2-L3-VH1-L4-CH1-Fc; VH1-L1-VH2-L2-VL2-L3-VL1-L4-CH1-Fc; VL1-L1-VL2-L2-VH2-L3-VH1-L4-CL-Fc; VH1-L1-VH2-L2-VL2-L3-VL1-L4-CL-Fc; VL1-L1-VL2-L2-VH2-L3-VH1-L4-CH1-L5-CL-Fc; VH1-L1-VH2-L2-VL2-L3-VL1-L4-CH1-L5-CL-Fc; VL1-L1-VL2-L2-VH2-L3-VH1-L4-CL- L5-CH1-Fc; or VH1-L1-VH2-L2-VL2-L3-VL1-L4-CL-L5-CH1-Fc; wherein VL1 is a first immunoglobulin light chain variable region; VL2 is a second immunoglobulin light chain variable region; VH1 is a first immunoglobulin heavy chain variable region; VH2 is a second immunoglobulin heavy chain variable region; CH1 is an immunoglobulin heavy chain constant region 1; CL is an immunoglobulin light chain constant region; and Fc is a region comprising an immunoglobulin heavy chain constant region 2 (CH2), an immunoglobulin heavy chain constant region 3 (CH3), and optionally, an immunoglobulin hinge; and L1, L2, L3, L4 and L5 are amino acid linkers.

[0130] In some aspects, the antigen binding polypeptide complex as defined herein further comprises at least two of an Fc region, a CH1 region and a CL region which is optionally positioned at the carboxy terminus of the first polypeptide and/or second polypeptide. For example, the carboxy terminus of the first polypeptide and/or second polypeptide may comprise the structure CH1-Fc. For example, the carboxy terminus of the first polypeptide and/or second polypeptide may comprise the structure CL-Fc. For example, the carboxy terminus of the first polypeptide and/or second polypeptide may comprise the structure CL-CH1-Fc. For example, the carboxy terminus of the first polypeptide and/or second polypeptide may comprise the structure CH1-CL-Fc. In some aspects, the first polypeptide may comprise at its C-terminus at least two of an Fc region, a CH1 region and a CL region and the second polypeptide may comprise at its C-terminus an Fc region. The Fc region, CH1 region and/or CL region can be linked to the first polypeptide and/or second polypeptide via at least one amino acid linker. The Fc region, CH1 region and/or CL region can be linked to each other via at least one amino acid linker. For example, the antigen binding complex may comprise a first polypeptide and a second polypeptide; wherein the first polypeptide has a structure represented by VL1-VL2-VH2-VH1-CH1-Fc; VH1-VH2-VL2-VL1-CH1-Fc; VL1-VL2-VH2-VH1-CL-Fc; VH1-VH2-VL2-VL1-CL-Fc; VL1-VL2-VH2-VH1-CH1-CL-Fc; VH1-VH2-VL2-VL1-CH1-CL-Fc; VL1-VL2-VH2-VH1-CL-CH1-Fc; VH1-VH2-VL2-VL1-CL-CH1-Fc; VL1-L1-VL2-L2-VH2-L3-VH1-L4-CH1-Fc; VH1-L1-VH2-L2-VL2-L3-VL1-L4-CH1-Fc; VL1-L1-VL2-L2-VH2-L3-VH1-L4- CL-Fc; VH1-L1-VH2-L2-VL2-L3-VL1-L4-CL-Fc; VL1-L1-VL2-L2-VH2-L3-VH1-L4-CH1-L5-CL-Fc; VH1-L1-VH2-L2-VL2-L3-VL1-L4-CH1-L5-CL-Fc; VL1-L1-VL2-L2-VH2-L3-VH1-L4-CL-L5-CH1-Fc; or VH1-L1-VH2-L2-VL2-L3-VL1-L4-CL-L5-CH1-Fc; wherein the second polypeptide has a structure represented by Fc; VL1-VL2-VH2-VH1-CH1-Fc; VH1-VH2-VL2-VL1-CH1-Fc; VL1-VL2-VH2-VH1-CL-Fc; VH1-VH2-VL2-VL1-CL-Fc; VL1-VL2-VH2-VH1-CH1-CL-Fc; VH1-VH2-VL2-VL1-CH1-CL-Fc; VL1-VL2-VH2-VH1-CL-CH1-Fc; VH1-VH2-VL2-VL1-CL-CH1-Fc; VL1-L1-VL2-L2-VH2-L3-VH1-L4-CH1-Fc; VH1-L1-VH2-L2-VL2-L3-VL1-L4-CH1-Fc; VL1-L1-VL2-L2-VH2- L3-VH1-L4-CL-Fc; VH1-L1-VH2-L2-VL2-L3-VL1-L4-CL-Fc; VL1-L1-VL2-L2-VH2-L3-VH1-L4-CH1-L5-CL-Fc; VH1-L1-VH2-L2-VL2-L3-VL1-L4-CH1-L5-CL-Fc; VL1-L1-VL2-L2-VH2-L3-VH1-L4-CL-L5-CH1-Fc; or VH1-L1-VH2-L2-VL2-L3-VL1-L4-CL-L5-CH1-Fc; wherein VL1 is a first immunoglobulin light chain variable region; VL2 is a second immunoglobulin light chain variable region; VH1 is a first immunoglobulin heavy chain variable region; VH2 is a second immunoglobulin heavy chain variable region; CH1 is an immunoglobulin heavy chain constant region 1; CL is an immunoglobulin light chain constant region; Fc is a region comprising an immunoglobulin heavy chain constant region 2 (CH2), an immunoglobulin heavy chain constant region 3 (CH3), and optionally, an immunoglobulin hinge; and L1, L2, L3, L4 and L5 are amino acid linkers. In some aspects, the first polypeptide has a structure represented by VL1-VL2-VH2-VH1-CH1-Fc and the second polypeptide has a structure represented by Fc; VL1-VL2-VH2-VH1-CH1-Fc; VH1-VH2-VL2-VL1-CH1-Fc; VL1-VL2-VH2-VH1-CL-Fc; VH1-VH2-VL2-VL1-CL-Fc; VL1-VL2-VH2-VH1-CH1-CL-Fc; VH1-VH2-VL2-VL1-CH1-CL-Fc; VL1-VL2-VH2-VH1-CL-CH1-Fc; VH1-VH2-VL2-VL1-CL-CH1-Fc; VL1-L1-VL2-L2-VH2-L3-VH1-L4-CH1-Fc; VH1-L1-VH2-L2-VL2-L3-VL1-L4-CH1-Fc; VL1-L1-VL2-L2-VH2-L3- VH1-L4-CL-Fc; VH1-L1-VH2-L2-VL2-L3-VL1-L4-CL-Fc; VL1-L1-VL2-L2-VH2-L3-VH1-L4-CH1-L5-CL-Fc; VH1-L1-VH2-L2-VL2-L3-VL1-L4-CH1-L5-CL-Fc; VL1-L1-VL2-L2-VH2-L3-VH1-L4-CL-L5-CH1-Fc; or VH1-L1-VH2-L2-VL2-L3-VL1-L4-CL-L5-CH1-Fc. In some aspects, the first polypeptide has a structure represented by VH1-VH2-VL2-VL1-CH1-Fc and the second polypeptide has a structure represented by Fc; VL1-VL2-VH2-VH1-CH1-Fc; VH1-VH2-VL2-VL1-CH1-Fc; VL1-VL2-VH2-VH1-CL-Fc; VH1-VH2-VL2-VL1-CL-Fc; VL1-VL2-VH2-VH1-CH1-CL-Fc; VH1-VH2-VL2-VL1-CH1-CL-Fc; VL1-VL2-VH2-VH1-CL-CH1-Fc; VH1-VH2-VL2-VL1-CL-CH1-Fc; VL1-L1-VL2-L2-VH2-L3-VH1-L4-CH1-Fc; VH1-L1-VH2-L2-VL2-L3-VL1-L4-CH1-Fc; VL1-L1-VL2-L2-VH2-L3-VH1-L4- CL-Fc; VH1-L1-VH2-L2-VL2-L3-VL1-L4-CL-Fc; VL1-L1-VL2-L2-VH2-L3-VH1-L4-CH1-L5-CL-Fc; VH1-L1-VH2-L2-VL2-L3-VL1-L4-CH1-L5-CL-Fc; VL1-L1-VL2-L2-VH2-L3-VH1-L4-CL-L5-CH1-Fc; or VH1-L1-VH2-L2-VL2-L3-VL1-L4-CL-L5-CH1-Fc. In some aspects, the first polypeptide has a structure represented by VL1-VL2-VH2-VH1-CL-Fc and the second polypeptide has a structure represented by Fc; VL1-VL2-VH2-VH1-CH1-Fc; VH1-VH2-VL2-VL1-CH1-Fc; VL1-VL2-VH2-VH1-CL-Fc; VH1-VH2-VL2-VL1-CL-Fc; VL1-VL2-VH2-VH1-CH1-CL-Fc; VH1-VH2-VL2-VL1-CH1-CL-Fc; VL1-VL2-VH2-VH1-CL-CH1-Fc; VH1-VH2-VL2-VL1-CL-CH1-Fc; VL1-L1-VL2-L2-VH2-L3-VH1-L4-CH1-Fc; VH1-L1-VH2-L2-VL2-L3-VL1-L4-CH1-Fc; VL1-L1-VL2-L2-VH2-L3-VH1-L4-CL-Fc; VH1-L1-VH2-L2-VL2-L3-VL1-L4-CL-Fc; VL1-L1-VL2-L2-VH2-L3-VH1-L4-CH1-L5-CL-Fc; VH1-L1-VH2-L2-VL2-L3-VL1-L4-CH1-L5-CL-Fc; VL1-L1-VL2-L2-VH2-L3-VH1-L4-CL-L5-CH1-Fc; or VH1-L1-VH2-L2-VL2-L3-VL1-L4-CL-L5-CH1-Fc. In some aspects, the first polypeptide has a structure represented by VH1-VH2-VL2-VL1-CL-Fc and the second polypeptide has a structure represented by Fc; VL1-VL2-VH2-VH1-CH1-Fc; VH1-VH2-VL2-VL1-CH1-Fc; VL1-VL2-VH2-VH1-CL-Fc; VH1-VH2-VL2-VL1-CL-Fc; VL1-VL2-VH2-VH1-CH1-CL-Fc; VH1-VH2-VL2-VL1-CH1-CL-Fc; VL1-VL2-VH2-VH1-CL-CH1-Fc; VH1-VH2-VL2-VL1-CL-CH1-Fc; VL1-L1-VL2-L2-VH2-L3-VH1-L4-CH1-Fc; VH1-L1-VH2-L2-VL2-L3-VL1-L4-CH1-Fc; VL1-L1-VL2-L2-VH2-L3-VH1-L4-CL-Fc; VH1-L1-VH2-L2-VL2-L3-VL1-L4-CL-Fc; VL1-L1-VL2-L2-VH2-L3-VH1-L4-CH1-L5-CL-Fc; VH1-L1-VH2-L2-VL2-L3-VL1-L4-CH1-L5-CL-Fc; VL1-L1-VL2-L2-VH2-L3-VH1-L4-CL-L5-CH1-Fc; or VH1-L1-VH2-L2-VL2-L3-VL1-L4-CL-L5-CH1-Fc. In some aspects, the first polypeptide has a structure represented by VL1-VL2-VH2-VH1-CH1-CL-Fc and the second polypeptide has a structure represented by Fc; VL1-VL2-VH2-VH1-CH1-F c; VH1-VH2-VL2-VL1-CH1-Fc; VL1-VL2-VH2-VH1-CL-Fc; VH1-VH2-VL2-VL1-CL-Fc; VL1-VL2-VH2-VH1-CH1-CL-Fc; VH1-VH2-VL2-VL1-CH1-CL-Fc; VL1-VL2-VH2-VH1-CL-CH1-Fc; VH1-VH2-VL2-VL1-CL-CH1-Fc; VL1-L1-VL2-L2-VH2-L3-VH1-L4-CH1-Fc; VH1-L1-VH2-L2-VL2-L3-VL1-L4-CH1-Fc; VL1-L1-VL2-L2-VH2-L3-VH1-L4-CL-Fc; VH1-L1-VH2-L2-VL2-L3-VL1-L4-CL-Fc; VL1-L1-VL2-L2-VH2-L3-VH1-L4-CH1-L5-CL-Fc; VH1-L1-VH2-L2-VL2-L3-VL1-L4-CH1-L5-CL-Fc; VL1-L1-VL2-L2-VH2-L3-VH1-L4-CL-L5-CH1-Fc; or VH1-L1-VH2-L2-VL2-L3-VL1-L4-CL-L5-CH1-Fc. In some aspects, the first polypeptide has a structure represented by VH1-VH2-VL2-VL1-CH1-CL-Fc and the second polypeptide has a structure represented by Fc; VL1-VL2-VH2-VH1-CH1-F c; VH1-VH2-VL2-VL1-CH1-Fc; VL1-VL2-VH2-VH1-CL-Fc; VH1-VH2-VL2-VL1-CL-Fc; VL1-VL2-VH2-VH1-CH1-CL-Fc; VH1-VH2-VL2-VL1-CH1-CL-Fc; VL1-VL2-VH2-VH1-CL-CH1-Fc; VH1-VH2-VL2-VL1-CL-CH1-Fc; VL1-L1-VL2-L2-VH2-L3-VH1-L4-CH1-Fc; VH1-L1-VH2-L2-VL2-L3-VL1-L4-CH1-Fc; VL1-L1-VL2-L2-VH2-L3-VH1-L4-CL-Fc; VH1-L1-VH2-L2-VL2-L3-VL1-L4-CL-Fc; VL1-L1-VL2-L2-VH2-L3-VH1-L4-CH1-L5-CL-Fc; VH1-L1-VH2-L2-VL2-L3-VL1-L4-CH1-L5-CL-Fc; VL1-L1-VL2-L2-VH2-L3-VH1-L4-CL-L5-CH1-Fc; or VH1-L1-VH2-L2-VL2-L3-VL1-L4-CL-L5-CH1-Fc. In some aspects, the first polypeptide has a structure represented by VL1-VL2-VH2-VH1-CL-CH1-Fc and the second polypeptide has a structure represented by Fc; VL1-VL2-VH2-VH1-CH1-Fe; VH1-VH2-VL2-VL1-CH1-Fc; VL1-VL2-VH2-VH1-CL-Fc; VH1-VH2-VL2-VL1-CL-Fc; VL1-VL2-VH2-VH1-CH1-CL-Fc; VH1-VH2-VL2-VL1-CH1-CL-Fc; VL1-VL2-VH2-VH1-CL-CH1-Fc; VH1-VH2-VL2-VL1-CL-CH1-Fc; VL1-L1-VL2-L2-VH2-L3-VH1-L4-CH1-Fc; VH1-L1-VH2-L2-VL2-L3-VL1-L4-CH1-Fc; VL1-L1-VL2-L2-VH2-L3-VH1-L4-CL-Fc; VH1-L1-VH2-L2-VL2-L3-VL1-L4-CL-Fc; VL1-L1-VL2-L2-VH2-L3-VH1-L4-CH1-L5-CL-Fc; VH1-L1-VH2-L2-VL2-L3-VL1-L4-CH1-L5-CL-Fc; VL1-L1-VL2-L2-VH2-L3-VH1-L4-CL-L5-CH1-Fc; or VH1-L1-VH2-L2-VL2-L3-VL1-L4-CL-L5-CH1-Fc. In some aspects, the first polypeptide has a structure represented by VH1-VH2-VL2-VL1-CL-CH1-Fc and the second polypeptide has a structure represented by Fc; VL1-VL2-VH2-VH1-CH1-Fe; VH1-VH2-VL2-VL1-CH1-Fc; VL1-VL2-VH2-VH1-CL-Fc; VH1-VH2-VL2-VL1-CL-Fc; VL1-VL2-VH2-VH1-CH1-CL-Fc; VH1-VH2-VL2-VL1-CH1-CL-Fc; VL1-VL2-VH2-VH1-CL-CH1-Fc; VH1-VH2-VL2-VL1-CL-CH1-Fc; VL1-L1-VL2-L2-VH2-L3-VH1-L4-CH1-Fc; VH1-L1-VH2-L2-VL2-L3-VL1-L4-CH1-Fc; VL1-L1-VL2-L2-VH2-L3-VH1-L4-CL-Fc; VH1-L1-VH2-L2-VL2-L3-VL1-L4-CL-Fc; VL1-L1-VL2-L2-VH2-L3-VH1-L4-CH1-L5-CL-Fc; VH1-L1-VH2-L2-VL2-L3-VL1-L4-CH1-L5-CL-Fc; VL1-L1-VL2-L2-VH2-L3-VH1-L4-CL-L5-CH1-Fc; or VH1-L1-VH2-L2-VL2-L3-VL1-L4-CL-L5-CH1-Fc. In some aspects, the first polypeptide has a structure represented by VL1-L1-VL2-L2-VH2-L3-VH1-L4-CH1-Fc and the second polypeptide has a structure represented by Fc; VL1-VL2-VH2-VH1-CH1-Fc; VH1-VH2-VL2-VL1-CH1-Fc; VL1-VL2-VH2-VH1-CL-Fc; VH1-VH2-VL2-VL1-CL-Fc; VL1-VL2-VH2-VH1-CH1-CL-Fc; VH1-VH2-VL2-VL1-CH1-CL-Fc; VL1-VL2-VH2-VH1-CL-CH1-Fc; VH1-VH2-VL2-VL1-CL-CH1-Fc; VL1-L1-VL2-L2-VH2-L3-VH1-L4-CH1-Fc; VH1-L1-VH2-L2-VL2-L3-VL1-L4-CH1-Fc; VL1-L1-VL2-L2-VH2-L3-VH1-L4-CL-Fc; VH1-L1-VH2-L2-VL2-L3-VL1-L4-CL-Fc; VL1-L1-VL2-L2-VH2-L3-VH1-L4-CH1-L5-CL-Fc; VH1-L1-VH2-L2-VL2-L3-VL1-L4-CH1-L5-CL-Fc; VL1-L1-VL2-L2-VH2-L3-VH1-L4-CL-L5-CH1-Fc; or VH1-L1-VH2-L2-VL2-L3-VL1-L4-CL-L5-CH1-Fc. In some aspects, the first polypeptide has a structure represented by VH1-L1-VH2-L2-VL2-L3-VL1-L4-CH1-Fc and the second polypeptide has a structure represented by Fc; VL1-VL2-VH2-VH1-CH1-Fc; VH1-VH2-VL2-VL1-CH1-Fc; VL1-VL2-VH2-VH1-CL-Fc; VH1-VH2-VL2-VL1-CL-Fc; VL1-VL2-VH2-VH1-CH1-CL-Fc; VH1-VH2-VL2-VL1-CH1-CL-Fc; VL1-VL2-VH2-VH1-CL-CH1-Fc; VH1-VH2-VL2-VL1-CL-CH1-Fc; VL1-L1-VL2-L2-VH2-L3-VH1-L4-CH1-Fc; VH1-L1-VH2-L2-VL2-L3-VL1-L4-CH1-Fc; VL1-L1-VL2-L2-VH2-L3-VH1-L4- CL-Fc; VH1-L1-VH2-L2-VL2-L3-VL1-L4-CL-Fc; VL1-L1-VL2-L2-VH2-L3-VH1-L4-CH1-L5-CL-Fc; VH1-L1-VH2-L2-VL2-L3-VL1-L4-CH1-L5-CL-Fc; VL1-L1-VL2-L2-VH2-L3-VH1-L4-CL-L5-CH1-Fc; or VH1-L1-VH2-L2-VL2-L3-VL1-L4-CL-L5-CH1-Fc. In some aspects, the first polypeptide has a structure represented by VL1-L1-VL2-L2-VH2-L3-VH1-L4-CL-Fc and the second polypeptide has a structure represented by Fc; VL1-VL2-VH2-VH1-CH1-Fc; VH1-VH2-VL2-VL1-CH1-Fc; VL1-VL2-VH2-VH1-CL-Fc; VH1-VH2-VL2-VL1-CL-Fc; VL1-VL2-VH2-VH1-CH1-CL-Fc; VH1-VH2-VL2-VL1-CH1-CL-Fc; VL1-VL2-VH2-VH1-CL-CH1-Fc; VH1-VH2-VL2-VL1-CL-CH1-Fc; VL1-L1-VL2-L2-VH2-L3-VH1-L4-CH1-Fc; VH1-L1-VH2-L2-VL2-L3-VL1-L4-CH1-Fc; VL1-L1-VL2-L2-VH2-L3-VH1-L4- CL-Fc; VH1-L1-VH2-L2-VL2-L3-VL1-L4-CL-Fc; VL1-L1-VL2-L2-VH2-L3-VH1-L4-CH1-L5-CL-Fc; VH1-L1-VH2-L2-VL2-L3-VL1-L4-CH1-L5-CL-Fc; VL1-L1-VL2-L2-VH2-L3-VH1-L4-CL-L5-CH1-Fc; or VH1-L1-VH2-L2-VL2-L3-VL1-L4-CL-L5-CH1-Fc. In some aspects, the first polypeptide has a structure represented by VH1-L1-VH2-L2-VL2-L3-VL1-L4-CL-Fc and the second polypeptide has a structure represented by Fc; VL1-VL2-VH2-VH1-CH1-Fc; VH1-VH2-VL2-VL1-CH1-Fc; VL1-VL2-VH2-VH1-CL-Fc; VH1-VH2-VL2-VL1-CL-Fc; VL1-VL2-VH2-VH1-CH1-CL-Fc; VH1-VH2-VL2-VL1-CH1-CL-Fc; VL1-VL2-VH2-VH1-CL-CH1-Fc; VH1-VH2-VL2-VL1-CL-CH1-Fc; VL1-L1-VL2-L2-VH2-L3-VH1-L4-CH1-Fc; VH1-L1-VH2-L2-VL2-L3-VL1-L4-CH1-Fc; VL1-L1-VL2-L2-VH2-L3-VH1-L4- CL-Fc; VH1-L1-VH2-L2-VL2-L3-VL1-L4-CL-Fc; VL1-L1-VL2-L2-VH2-L3-VH1-L4-CH1-L5-CL-Fc; VH1-L1-VH2-L2-VL2-L3-VL1-L4-CH1-L5-CL-Fc; VL1-L1-VL2-L2-VH2-L3-VH1-L4-CL-L5-CH1-Fc; or VH1-L1-VH2-L2-VL2-L3-VL1-L4-CL-L5-CH1-Fc. In some aspects, the first polypeptide has a structure represented by VL1-L1-VL2-L2-VH2-L3-VH1-L4-CH1-L5-CL-Fc and the second polypeptide has a structure represented by Fc; VL1-VL2-VH2-VH1-CH1-Fc; VH1-VH2-VL2-VL1-CH1-Fc; VL1-VL2-VH2-VH1-CL-Fc; VH1-VH2-VL2-VL1-CL-Fc; VL1-VL2-VH2-VH1-CH1-CL-Fc; VH1-VH2-VL2-VL1-CH1-CL-Fc; VL1-VL2-VH2-VH1-CL-CH1-Fc; VH1-VH2-VL2-VL1-CL-CH1-Fc; VL1-L1-VL2-L2-VH2-L3-VH1-L4-CH1-Fc; VH1-L1-VH2-L2-VL2-L3-VL1-L4-CH1-Fc; VL1-L1-VL2-L2-VH2-L3- VH1-L4-CL-Fc; VH1-L1-VH2-L2-VL2-L3-VL1-L4-CL-Fc; VL1-L1-VL2-L2-VH2-L3-VH1-L4-CH1-L5-CL-Fc; VH1-L1-VH2-L2-VL2-L3-VL1-L4-CH1-L5-CL-Fc; VL1-L1-VL2-L2-VH2-L3-VH1-L4-CL-L5-CH1-Fc; or VH1-L1-VH2-L2-VL2-L3-VL1-L4-CL-L5-CH1-Fc. In some aspects, the first polypeptide has a structure represented by VH1-L1-VH2-L2-VL2-L3-VL1-L4-CH1-L5-CL-Fc and the second polypeptide has a structure represented by Fc; VL1-VL2-VH2-VH1-CH1-Fc; VH1-VH2-VL2-VL1-CH1-Fc; VL1-VL2-VH2-VH1-CL-Fc; VH1-VH2-VL2-VL1-CL-Fc; VL1-VL2-VH2-VH1-CH1-CL-Fc; VH1-VH2-VL2-VL1-CH1-CL-Fc; VL1-VL2-VH2-VH1-CL-CH1-Fc; VH1-VH2-VL2-VL1-CL-CH1-Fc; VL1-L1-VL2-L2-VH2-L3-VH1-L4-CH1-Fc; VH1-L1-VH2-L2-VL2-L3-VL1-L4-CH1-Fc; VL1-L1-VL2-L2-VH2-L3-VH1-L4-CL-Fc; VH1-L1-VH2-L2-VL2-L3-VL1-L4-CL-Fc; VL1-L1-VL2-L2-VH2-L3-VH1-L4-CH1-L5-CL-Fc; VH1-L1-VH2-L2-VL2-L3-VL1-L4-CH1-L5-CL-Fc; VL1-L1-VL2-L2-VH2-L3-VH1-L4-CL-L5-CH1-Fc; or VH1-L1-VH2-L2-VL2-L3-VL1-L4-CL-L5-CH1-Fc. In some aspects, the first polypeptide has a structure represented by VL1-L1-VL2-L2-VH2-L3-VH1-L4-CL-L5-CH1-Fc and the second polypeptide has a structure represented by Fc; VL1-VL2-VH2-VH1-CH1-Fc; VH1-VH2-VL2-VL1-CH1-Fc; VL1-VL2-VH2-VH1-CL-Fc; VH1-VH2-VL2-VL1-CL-Fc; VL1-VL2-VH2-VH1-CH1-CL-Fc; VH1-VH2-VL2-VL1-CH1-CL-Fc; VL1-VL2-VH2-VH1-CL-CH1-Fc; VH1-VH2-VL2-VL1-CL-CH1-Fc; VL1-L1-VL2-L2-VH2-L3-VH1-L4-CH1-Fc; VH1-L1-VH2-L2-VL2-L3-VL1-L4-CH1-Fc; VL1-L1-VL2-L2-VH2-L3-VH1-L4-CL-Fc; VH1-L1-VH2-L2-VL2-L3-VL1-L4-CL-Fc; VL1-L1-VL2-L2-VH2-L3-VH1-L4-CH1-L5-CL-Fc; VH1-L1-VH2-L2-VL2-L3-VL1-L4-CH1-L5-CL-Fc; VL1-L1-VL2-L2-VH2-L3-VH1-L4-CL- L5-CH1-Fc; or VH1-L1-VH2-L2-VL2-L3-VL1-L4-CL-L5-CH1-Fc. In some aspects, the first polypeptide has a structure represented by VH1-L1-VH2-L2-VL2-L3-VL1-L4-CL-L5-CH1-Fc and the second polypeptide has a structure represented by Fc; VL1-VL2-VH2-VH1-CH1-Fc; VH1-VH2-VL2-VL1-CH1-Fc; VL1-VL2-VH2-VH1-CL-Fc; VH1-VH2-VL2-VL1-CL-Fc; VL1-VL2-VH2-VH1-CH1-CL-Fc; VH1-VH2-VL2-VL1-CH1-CL-Fc; VL1-VL2-VH2-VH1-CL-CH1-Fc; VH1-VH2-VL2-VL1-CL-CH1-Fc; VL1-L1-VL2-L2-VH2-L3-VH1-L4-CH1-Fc; VH1-L1-VH2-L2-VL2-L3-VL1-L4-CH1-Fc; VL1-L1-VL2-L2-VH2-L3-VH1-L4-CL-Fc; VH1-L1-VH2-L2-VL2-L3-VL1-L4-CL-Fc; VL1-L1-VL2-L2-VH2-L3-VH1-L4-CH1-L5-CL-Fc; VH1-L1-VH2-L2-VL2-L3-VL1-L4-CH1-L5-CL-Fc; VL1-L1-VL2-L2-VH2-L3-VH1-L4-CL-L5-CH1-Fc; or VH1-L1-VH2-L2-VL2-L3-VL1-L4-CL-L5-CH1-Fc.

[0131] In some aspects, the antigen binding polypeptide complex comprises a first polypeptide and a second polypeptide; wherein the first polypeptide has a structure represented by: VL1-VL2-VH2-VH1; VH1-VH2-VL2-VL1; VL1-L1-VL2-L2-VH2-L3-VH1; VH1-L1-VH2-L2-VL2-L3-VL1; VL1-VL2-VH2-VH1-Fc; VH1-VH2-VL2-VL1-Fc; VL1-L1-VL2-L2-VH2-L3-VH1-Fc; VH1-L1-VH2-L2-VL2-L3-VL1-Fc; VL1-L1-VL2-L2-VH2-L3-VH1-L4-Fc; VH1-L1-VH2-L2-VL2-L3-VL1-L4-Fc; VL1-VL2-VH2-VH1-CH1; VH1-VH2-VL2-VL1-CH1; VL1-VL2-VH2-VH1-CL; VH1-VH2-VL2-VL1-CL; VL1-VL2-VH2-VH1-CH1-CL; VH1-VH2-VL2-VL1-CH1-CL; VL1-VL2-VH2-VH1-CL-CH1; VH1-VH2-VL2-VL1-CL-CH1; VL1-L1-VL2-L2-VH2-L3-VH1-L4-CH1; VH1-L1-VH2-L2-VL2-L3-VL1-L4-CH1; VL1-L1-VL2-L2-VH2-L3-VH1-L4-CL; VH1-L1-VH2-L2-VL2-L3-VL1-L4-CL; VL1-L1-VL2-L2-VH2-L3- VH1-L4-CH1-L5-CL; VH1-L1-VH2-L2-VL2-L3-VL1-L4-CH1-L5-CL; VL1-L1-VL2-L2-VH2-L3-VH1-L4-CL-L5-CH1; VH1-L1-VH2-L2-VL2-L3-VL1-L4-CL-L5-CH1; VL1-VL2-VH2-VH1-CH1-Fc; VH1-VH2-VL2-VL1-CH1-Fc; VL1-VL2-VH2-VH1-CL-Fc; VH1-VH2-VL2-VL1-CL-Fc; VL1-VL2-VH2-VH1-CH1-CL-Fc; VH1-VH2-VL2-VL1-CH1-CL-Fc; VL1-VL2-VH2-VH1-CL-CH1-Fc; VH1-VH2-VL2-VL1-CL-CH1-Fc; VL1-L1-VL2-L2-VH2-L3-VH1-L4-CH1-Fc; VH1-L1-VH2-L2-VL2-L3-VL1-L4-CH1-Fc; VL1-L1-VL2-L2-VH2-L3-VH1-L4-CL-Fc; VH1-L1-VH2-L2-VL2-L3-VL1-L4-CL-Fc; VL1-L1-VL2-L2-VH2-L3-VH1-L4-CH1-L5-CL-Fc; VH1-L1-VH2-L2-VL2-L3-VL1-L4-CH1-L5-CL-Fc; VL1-L1-VL2-L2-VH2-L3-VH1-L4-CL-L5-CH1-Fc; or VH1-L1-VH2-L2-VL2-L3-VL1-L4-CL-L5-CH1-Fc; wherein the second polypeptide has a structure represented by Fc; VL1-VL2-VH2-VH1; VH1-VH2-VL2-VL1; VL1-L1-VL2-L2-VH2-L3-VH1; VH1-L1-VH2-L2-VL2-L3-VL1; VL1-VL2-VH2-VH1-Fc; VH1-VH2-VL2-VL1-Fc; VL1-L1-VL2-L2-VH2-L3-VH1-Fc; VH1-L1-VH2-L2-VL2-L3-VL1-Fc; VL1-L1-VL2-L2-VH2-L3-VH1-L4-Fc; VH1-L1-VH2-L2-VL2-L3-VL1-L4-Fc; VL1-VL2-VH2-VH1-CH1; VH1-VH2-VL2-VL1-CH1; VL1-VL2-VH2-VH1-CL; VH1-VH2-VL2-VL1-CL; VL1-VL2-VH2-VH1-CH1-CL; VH1-VH2-VL2-VL1-CH1-CL; VL1-VL2-VH2-VH1-CL-CH1; VH1-VH2-VL2-VL1-CL-CH1; VL1-L1-VL2-L2-VH2-L3-VH1-L4-CH1; VH1-L1-VH2-L2-VL2-L3-VL1-L4-CH1; VL1- L1-VL2-L2-VH2-L3-VH1-L4-CL; VH1-L1-VH2-L2-VL2-L3-VL1-L4-CL; VL1-L1-VL2-L2-VH2-L3-VH1-L4-CH1- L5-CL; VH1-L1-VH2-L2-VL2-L3-VL1-L4-CH1-L5-CL; VL1-L1-VL2-L2-VH2-L3-VH1-L4-CL-L5-CH1; VH1-L1-VH2-L2-VL2-L3-VL1-L4-CL-L5-CH1; VL1-VL2-VH2-VH1-CH1-Fc; VH1-VH2-VL2-VL1-CH1-Fc; VL1-VL2-VH2-VH1-CL-Fc; VH1-VH2-VL2-VL1-CL-Fc; VL1-VL2-VH2-VH1-CH1-CL-Fc; VH1-VH2-VL2-VL1-CH1-CL-Fc; VL1-VL2-VH2-VH1-CL-CH1-Fc; VH1-VH2-VL2-VL1-CL-CH1-Fc; VL1-L1-VL2-L2-VH2-L3-VH1-L4-CH1-Fc; VH1-L1-VH2-L2-VL2-L3-VL1-L4-CH1-Fc; VL1-L1-VL2-L2-VH2-L3-VH1-L4-CL-Fc; VH1-L1-VH2-L2-VL2-L3-VL1-L4-CL-Fc; VL1-L1-VL2-L2-VH2-L3-VH1-L4-CH1-L5-CL-Fc; VH1-L1-VH2-L2-VL2-L3-VL1-L4-CH1-L5-CL-Fc; VL1-L1-VL2-L2-VH2-L3-VH1-L4-CL-L5-CH1-Fc; or VH1-L1-VH2-L2-VL2-L3-VL1-L4-CL-L5-CH1-Fc; wherein VL1 is a first immunoglobulin light chain variable region; VL2 is a second immunoglobulin light chain variable region; VH1 is a first immunoglobulin heavy chain variable region; VH2 is a second immunoglobulin heavy chain variable region; CH1 is an immunoglobulin heavy chain constant region 1; CL is an immunoglobulin light chain constant region; Fc is a region comprising an immunoglobulin heavy chain constant region 2 (CH2), an immunoglobulin heavy chain constant region 3 (CH3), and optionally, an immunoglobulin hinge; and L1, L2, L3, L4 and L5 are amino acid linkers. In some aspects, the first polypeptide has a structure represented by VL1-VL2-VH2-VH1 and the second polypeptide has a structure represented by Fc; VL1-VL2-VH2-VH1; VH1-VH2-VL2-VL1; VL1-L1-VL2-L2-VH2-L3-VH1; VH1-L1-VH2-L2-VL2-L3-VL1; VL1-VL2-VH2-VH1-Fe; VH1-VH2-VL2-VL1-Fc; VL1-L1-VL2-L2-VH2-L3-VH1-Fe; VH1-L1-VH2-L2-VL2-L3-VL1-Fc; VL1-L1-VL2-L2-VH2-L3-VH1-L4-Fc; VH1-L1-VH2-L2-VL2-L3-VL1-L4-Fc; VL1-VL2-VH2-VH1-CH1; VH1-VH2-VL2-VL1-CH1; VL1-VL2-VH2-VH1-CL; VH1-VH2-VL2-VL1-CL; VL1-VL2-VH2-VH1-CH1-CL; VH1-VH2-VL2-VL1-CH1-CL; VL1-VL2-VH2-VH1-CL-CH1; VH1-VH2-VL2-VL1-CL-CH1; VL1-L1-VL2-L2-VH2-L3-VH1-L4-CH1; VH1-L1-VH2-L2-VL2-L3-VL1-L4-CH1; VL1-L1-VL2-L2-VH2-L3-VH1-L4-CL; VH1- L1-VH2-L2-VL2-L3-VL1-L4-CL; VL1-L1-VL2-L2-VH2-L3-VH1-L4-CH1-L5-CL; VH1-L1-VH2-L2-VL2-L3-VL1- L4-CH1-L5-CL; VL1-L1-VL2-L2-VH2-L3-VH1-L4-CL-L5-CH1; VH1-L1-VH2-L2-VL2-L3-VL1-L4-CL-L5-CH1; VL1-VL2-VH2-VH1-CH1-Fe; VH1-VH2-VL2-VL1-CH1-Fc; VL1-VL2-VH2-VH1-CL-Fc; VH1-VH2-VL2-VL1-CL-Fc; VL1-VL2-VH2-VH1-CH1-CL-Fc; VH1-VH2-VL2-VL1-CH1-CL-Fc; VL1-VL2-VH2-VH1-CL-CH1-Fc; VH1-VH2-VL2-VL1-CL-CH1-Fe; VL1-L1-VL2-L2-VH2-L3-VH1-L4-CH1-Fc; VH1-L1-VH2-L2-VL2-L3-VL1-L4-CH1-Fc; VL1-L1-VL2-L2-VH2-L3-VH1-L4-CL-Fc; VH1-L1-VH2-L2-VL2-L3-VL1-L4-CL-Fc; VL1-L1-VL2-L2-VH2-L3-VH1-L4-CH1-L5-CL-Fe; VH1-L1-VH2-L2-VL2-L3-VL1-L4-CH1-L5-CL-Fe; VL1-L1-VL2-L2-VH2-L3-VH1-L4-CL- L5-CH1-Fe; or VH1-L1-VH2-L2-VL2-L3-VL1-L4-CL-L5-CH1-Fe. In some aspects, the first polypeptide has a structure represented by VH1-VH2-VL2-VL1 and the second polypeptide has a structure represented by Fc; VL1-VL2-VH2-VH1; VH1-VH2-VL2-VL1; VL1-L1-VL2-L2-VH2-L3-VH1; VH1-L1-VH2-L2-VL2-L3-VL1; VL1-VL2-VH2-VH1-Fc; VH1-VH2-VL2-VL1-Fc; VL1-L1-VL2-L2-VH2-L3-VH1-Fc; VH1-L1-VH2-L2-VL2-L3-VL1-Fc; VL1-L1-VL2-L2-VH2-L3-VH1-L4-Fe; VH1-L1-VH2-L2-VL2-L3-VL1-L4-Fc; VL1-VL2-VH2-VH1-CH1; VH1-VH2-VL2-VL1-CH1; VL1-VL2-VH2-VH1-CL; VH1-VH2-VL2-VL1-CL; VL1-VL2-VH2-VH1-CH1-CL; VH1-VH2-VL2-VL1-CH1-CL; VL1-VL2-VH2-VH1-CL-CH1; VH1-VH2-VL2-VL1-CL-CH1; VL1-L1-VL2-L2-VH2-L3-VH1-L4-CH1; VH1-L1-VH2-L2-VL2-L3-VL1-L4-CH1; VL1-L1-VL2-L2-VH2-L3-VH1-L4-CL; VH1-L1-VH2-L2-VL2-L3-VL1-L4-CL; VL1-L1-VL2-L2-VH2-L3-VH1-L4-CH1-L5-CL; VH1-L1-VH2-L2-VL2-L3-VL1-L4-CH1-L5-CL; VL1-L1-VL2-L2-VH2-L3-VH1-L4-CL-L5-CH1; VH1-L1-VH2-L2-VL2-L3-VL1-L4-CL-L5-CH1; VL1-VL2-VH2-VH1-CH1-Fe; VH1-VH2-VL2-VL1-CH1-Fc; VL1-VL2-VH2-VH1-CL-Fc; VH1-VH2-VL2-VL1-CL-Fc; VL1-VL2-VH2-VH1-CH1-CL-Fc; VH1-VH2-VL2-VL1-CH1-CL-Fc; VL1-VL2-VH2-VH1-CL-CH1-Fc; VH1-VH2-VL2-VL1-CL-CH1-Fc; VL1-L1-VL2-L2-VH2-L3-VH1-L4-CH1-Fe; VH1-L1-VH2-L2-VL2-L3-VL1-L4-CH1-Fc; VL1-L1-VL2-L2-VH2-L3- VH1-L4-CL-Fc; VH1-L1-VH2-L2-VL2-L3-VL1-L4-CL-Fc; VL1-L1-VL2-L2-VH2-L3-VH1-L4-CH1-L5-CL-Fe; VH1-L1-VH2-L2-VL2-L3-VL1-L4-CH1-L5-CL-Fe; VL1-L1-VL2-L2-VH2-L3-VH1-L4-CL-L5-CH1-Fc; or VH1-L1-VH2-L2-VL2-L3-VL1-L4-CL-L5-CH1-Fe. In some aspects, the first polypeptide has a structure represented by VL1-L1-VL2-L2-VH2-L3-VH1 and the second polypeptide has a structure represented by Fc; VL1-VL2-VH2-VH1; VH1-VH2-VL2-VL1; VL1-L1-VL2-L2-VH2-L3-VH1; VH1-L1-VH2-L2-VL2-L3-VL1; VL1-VL2-VH2-VH1-Fc; VH1-VH2-VL2-VL1-Fc; VL1-L1-VL2-L2-VH2-L3-VH1-Fe; VH1-L1-VH2-L2-VL2-L3-VL1-Fc; VL1-L1-VL2-L2-VH2-L3-VH1-L4-Fe; VH1-L1-VH2-L2-VL2-L3-VL1-L4-Fc; VL1-VL2-VH2-VH1-CH1; VH1-VH2-VL2-VL1-CH1; VL1-VL2-VH2-VH1-CL; VH1-VH2-VL2-VL1-CL; VL1-VL2-VH2-VH1-CH1-CL; VH1-VH2-VL2-VL1-CH1-CL; VL1-VL2-VH2-VH1-CL-CH1; VH1-VH2-VL2-VL1-CL-CH1; VL1-L1-VL2-L2-VH2-L3-VH1-L4-CH1; VH1-L1-VH2-L2-VL2-L3-VL1-L4-CH1; VL1-L1-VL2-L2-VH2-L3-VH1-L4-CL; VH1-L1-VH2-L2-VL2-L3-VL1-L4-CL; VL1-L1-VL2-L2-VH2- L3-VH1-L4-CH1-L5-CL; VH1-L1-VH2-L2-VL2-L3-VL1-L4-CH1-L5-CL; VL1-L1-VL2-L2-VH2-L3-VH1-L4-CL-L5-CH1; VH1-L1-VH2-L2-VL2-L3-VL1-L4-CL-L5-CH1; VL1-VL2-VH2-VH1-CH1-Fc; VH1-VH2-VL2-VL1-CH1-Fc; VL1-VL2-VH2-VH1-CL-Fc; VH1-VH2-VL2-VL1-CL-Fc; VL1-VL2-VH2-VH1-CH1-CL-Fc; VH1-VH2-VL2-VL1-CH1-CL-Fc; VL1-VL2-VH2-VH1-CL-CH1-Fc; VH1-VH2-VL2-VL1-CL-CH1-Fc; VL1-L1-VL2-L2-VH2-L3-VH1-L4-CH1-Fc; VH1-L1-VH2-L2-VL2-L3-VL1-L4-CH1-Fc; VL1-L1-VL2-L2-VH2-L3-VH1-L4-CL-Fc; VH1-L1-VH2-L2-VL2-L3-VL1-L4-CL-Fc; VL1-L1-VL2-L2-VH2-L3-VH1-L4-CH1-L5-CL-Fc; VH1-L1-VH2-L2-VL2-L3-VL1-L4-CH1-L5-CL-Fc; VL1-L1-VL2-L2-VH2-L3-VH1-L4-CL-L5-CH1-Fc; or VH1-L1-VH2-L2-VL2-L3-VL1-L4-CL-L5-CH1-Fc. In some aspects, the first polypeptide has a structure represented by VH1-L1-VH2-L2-VL2-L3-VL1 and the second polypeptide has a structure represented by Fc; VL1-VL2-VH2-VH1; VH1-VH2-VL2-VL1; VL1-L1-VL2-L2-VH2-L3-VH1; VH1-L1-VH2-L2-VL2-L3-VL1; VL1-VL2-VH2-VH1-Fc; VH1-VH2-VL2-VL1-Fc; VL1-L1-VL2-L2-VH2-L3-VH1-Fc; VH1-L1-VH2-L2-VL2-L3-VL1-Fc; VL1-L1-VL2-L2-VH2-L3-VH1-L4-Fc; VH1-L1-VH2-L2-VL2-L3-VL1-L4-Fc; VL1-VL2-VH2-VH1-CH1; VH1-VH2-VL2-VL1-CH1; VL1-VL2-VH2-VH1-CL; VH1-VH2-VL2-VL1-CL; VL1-VL2-VH2-VH1-CH1-CL; VH1-VH2-VL2-VL1-CH1-CL; VL1-VL2-VH2-VH1-CL-CH1; VH1-VH2-VL2-VL1-CL-CH1; VL1-L1-VL2-L2-VH2-L3-VH1-L4-CH1; VH1-L1-VH2-L2-VL2-L3-VL1-L4-CH1; VL1-L1- VL2-L2-VH2-L3-VH1-L4-CL; VH1-L1-VH2-L2-VL2-L3-VL1-L4-CL; VL1-L1-VL2-L2-VH2-L3-VH1-L4-CH1-L5- CL; VH1-L1-VH2-L2-VL2-L3-VL1-L4-CH1-L5-CL; VL1-L1-VL2-L2-VH2-L3-VH1-L4-CL-L5-CH1; VH1-L1-VH2- L2-VL2-L3-VL1-L4-CL-L5-CH1; VL1-VL2-VH2-VH1-CH1-Fc; VH1-VH2-VL2-VL1-CH1-Fc; VL1-VL2-VH2-VH1-CL-Fc; VH1-VH2-VL2-VL1-CL-Fc; VL1-VL2-VH2-VH1-CH1-CL-Fc; VH1-VH2-VL2-VL1-CH1-CL-Fc; VL1-VL2-VH2-VH1-CL-CH1-Fc; VH1-VH2-VL2-VL1-CL-CH1-Fc; VL1-L1-VL2-L2-VH2-L3-VH1-L4-CH1-Fc; VH1-L1-VH2-L2-VL2-L3-VL1-L4-CH1-Fc; VL1-L1-VL2-L2-VH2-L3-VH1-L4-CL-Fc; VH1-L1-VH2-L2-VL2-L3-VL1-L4-CL-Fc; VL1-L1-VL2-L2-VH2-L3-VH1-L4-CH1-L5-CL-Fc; VH1-L1-VH2-L2-VL2-L3-VL1-L4-CH1-L5-CL-Fc; VL1-L1-VL2-L2-VH2-L3-VH1-L4-CL-L5-CH1-Fc; or VH1-L1-VH2-L2-VL2-L3-VL1-L4-CL-L5-CH1-Fc. In some aspects, the first polypeptide has a structure represented by VL1-VL2-VH2-VH1-Fc and the second polypeptide has a structure represented by Fc; VL1-VL2-VH2-VH1; VH1-VH2-VL2-VL1; VL1-L1-VL2-L2-VH2-L3-VH1; VH1-L1-VH2-L2-VL2-L3-VL1; VL1-VL2-VH2-VH1-Fc; VH1-VH2-VL2-VL1-Fc; VL1-L1-VL2-L2-VH2-L3-VH1-Fc; VH1-L1-VH2-L2-VL2-L3-VL1-Fc; VL1-L1-VL2-L2-VH2-L3-VH1-L4-Fc; VH1-L1-VH2-L2-VL2-L3-VL1-L4-Fc; VL1-VL2-VH2-VH1-CH1; VH1-VH2-VL2-VL1-CH1; VL1-VL2-VH2-VH1-CL; VH1-VH2-VL2-VL1-CL; VL1-VL2-VH2-VH1-CH1-CL; VH1-VH2-VL2-VL1-CH1-CL; VL1-VL2-VH2-VH1-CL-CH1; VH1-VH2-VL2-VL1-CL-CH1; VL1-L1-VL2-L2-VH2-L3-VH1-L4-CH1; VH1-L1-VH2-L2-VL2-L3-VL1-L4-CH1; VL1-L1-VL2-L2-VH2-L3-VH1-L4-CL; VH1- L1-VH2-L2-VL2-L3-VL1-L4-CL; VL1-L1-VL2-L2-VH2-L3-VH1-L4-CH1-L5-CL; VH1-L1-VH2-L2-VL2-L3-VL1- L4-CH1-L5-CL; VL1-L1-VL2-L2-VH2-L3-VH1-L4-CL-L5-CH1; VH1-L1-VH2-L2-VL2-L3-VL1-L4-CL-L5-CH1; VL1-VL2-VH2-VH1-CH1-Fc; VH1-VH2-VL2-VL1-CH1-Fc; VL1-VL2-VH2-VH1-CL-Fc; VH1-VH2-VL2-VL1-CL-Fc; VL1-VL2-VH2-VH1-CH1-CL-Fc; VH1-VH2-VL2-VL1-CH1-CL-Fc; VL1-VL2-VH2-VH1-CL-CH1-Fc; VH1-VH2-VL2-VL1-CL-CH1-Fc; VL1-L1-VL2-L2-VH2-L3-VH1-L4-CH1-Fc; VH1-L1-VH2-L2-VL2-L3-VL1-L4-CH1-Fc; VL1-L1-VL2-L2-VH2-L3-VH1-L4-CL-Fc; VH1-L1-VH2-L2-VL2-L3-VL1-L4-CL-Fc; VL1-L1-VL2-L2-VH2-L3-VH1-L4-CH1-L5-CL-Fc; VH1-L1-VH2-L2-VL2-L3-VL1-L4-CH1-L5-CL-Fc; VL1-L1-VL2-L2-VH2-L3-VH1-L4-CL- L5-CH1-Fc; or VH1-L1-VH2-L2-VL2-L3-VL1-L4-CL-L5-CH1-Fc. In some aspects, the first polypeptide has the structure represented by VH1-VH2-VL2-VL1-Fc and the second polypeptide has a structure represented by Fc; VL1-VL2-VH2-VH1; VH1-VH2-VL2-VL1; VL1-L1-VL2-L2-VH2-L3-VH1; VH1-L1-VH2-L2-VL2-L3-VL1; VL1-VL2-VH2-VH1-Fc; VH1-VH2-VL2-VL1-Fc; VL1-L1-VL2-L2-VH2-L3-VH1-Fc; VH1-L1-VH2-L2-VL2-L3-VL1-Fc; VL1-L1-VL2-L2-VH2-L3-VH1-L4-Fc; VH1-L1-VH2-L2-VL2-L3-VL1-L4-Fc; VL1-VL2-VH2-VH1-CH1; VH1-VH2-VL2-VL1-CH1; VL1-VL2-VH2-VH1-CL; VH1-VH2-VL2-VL1-CL; VL1-VL2-VH2-VH1-CH1-CL; VH1-VH2-VL2-VL1-CH1-CL; VL1-VL2-VH2-VH1-CL-CH1; VH1-VH2-VL2-VL1-CL-CH1; VL1-L1-VL2-L2-VH2-L3-VH1-L4-CH1; VH1-L1-VH2-L2-VL2-L3-VL1-L4-CH1; VL1-L1-VL2-L2-VH2-L3-VH1-L4-CL; VH1-L1-VH2-L2-VL2-L3-VL1-L4-CL; VL1-L1-VL2-L2-VH2-L3-VH1-L4-CH1-L5-CL; VH1-L1-VH2-L2-VL2-L3-VL1-L4-CH1-L5-CL; VL1-L1-VL2-L2-VH2-L3-VH1-L4-CL-L5-CH1; VH1-L1-VH2-L2-VL2-L3-VL1-L4-CL-L5-CH1; VL1-VL2-VH2-VH1-CH1-Fc; VH1-VH2-VL2-VL1-CH1-Fc; VL1-VL2-VH2-VH1-CL-Fc; VH1-VH2-VL2-VL1-CL-Fc; VL1-VL2-VH2-VH1-CH1-CL-Fc; VH1-VH2-VL2-VL1-CH1-CL-Fc; VL1-VL2-VH2-VH1-CL-CH1-Fc; VH1-VH2-VL2-VL1-CL-CH1-Fc; VL1-L1-VL2-L2-VH2-L3-VH1-L4-CH1-Fc; VH1-L1-VH2-L2-VL2-L3-VL1-L4-CH1-Fc; VL1-L1-VL2-L2-VH2-L3- VH1-L4-CL-Fc; VH1-L1-VH2-L2-VL2-L3-VL1-L4-CL-Fc; VL1-L1-VL2-L2-VH2-L3-VH1-L4-CH1-L5-CL-Fc; VH1-L1-VH2-L2-VL2-L3-VL1-L4-CH1-L5-CL-Fc; VL1-L1-VL2-L2-VH2-L3-VH1-L4-CL-L5-CH1-Fc; or VH1-L1-VH2-L2-VL2-L3-VL1-L4-CL-L5-CH1-Fc. In some aspects, the first polypeptide has a structure represented by VL1-L1-VL2-L2-VH2-L3-VH1-Fc and the second polypeptide has a structure represented by Fc; VL1-VL2-VH2-VH1; VH1-VH2-VL2-VL1; VL1-L1-VL2-L2-VH2-L3-VH1; VH1-L1-VH2-L2-VL2-L3-VL1; VL1-VL2-VH2-VH1-Fc; VH1-VH2-VL2-VL1-Fc; VL1-L1-VL2-L2-VH2-L3-VH1-Fc; VH1-L1-VH2-L2-VL2-L3-VL1-Fc; VL1-L1-VL2-L2-VH2-L3-VH1-L4-Fc; VH1-L1-VH2-L2-VL2-L3-VL1-L4-Fc; VL1-VL2-VH2-VH1-CH1; VH1-VH2-VL2-VL1-CH1; VL1-VL2-VH2-VH1-CL; VH1-VH2-VL2-VL1-CL; VL1-VL2-VH2-VH1-CH1-CL; VH1-VH2-VL2-VL1-CH1-CL; VL1-VL2-VH2-VH1-CL-CH1; VH1-VH2-VL2-VL1-CL-CH1; VL1-L1-VL2-L2-VH2-L3-VH1-L4-CH1; VH1-L1-VH2-L2-VL2-L3-VL1-L4-CH1; VL1-L1-VL2-L2-VH2-L3-VH1-L4-CL; VH1-L1-VH2-L2-VL2-L3-VL1-L4-CL; VL1-L1-VL2-L2-VH2- L3-VH1-L4-CH1-L5-CL; VH1-L1-VH2-L2-VL2-L3-VL1-L4-CH1-L5-CL; VL1-L1-VL2-L2-VH2-L3-VH1-L4-CL-L5-CH1; VH1-L1-VH2-L2-VL2-L3-VL1-L4-CL-L5-CH1; VL1-VL2-VH2-VH1-CH1-Fc; VH1-VH2-VL2-VL1-CH1-Fc; VL1-VL2-VH2-VH1-CL-Fc; VH1-VH2-VL2-VL1-CL-Fc; VL1-VL2-VH2-VH1-CH1-CL-Fc; VH1-VH2-VL2-VL1-CH1-CL-Fc; VL1-VL2-VH2-VH1-CL-CH1-Fc; VH1-VH2-VL2-VL1-CL-CH1-Fc; VL1-L1-VL2-L2-VH2-L3-VH1-L4-CH1-Fc; VH1-L1-VH2-L2-VL2-L3-VL1-L4-CH1-Fc; VL1-L1-VL2-L2-VH2-L3-VH1-L4-CL-Fc; VH1-L1-VH2-L2-VL2-L3-VL1-L4-CL-Fc; VL1-L1-VL2-L2-VH2-L3-VH1-L4-CH1-L5-CL-Fc; VH1-L1-VH2-L2-VL2-L3-VL1-L4-CH1-L5-CL-Fc; VL1-L1-VL2-L2-VH2-L3-VH1-L4-CL-L5-CH1-Fc; or VH1-L1-VH2-L2-VL2-L3-VL1-L4-CL-L5-CH1-Fc. In some aspects, the first polypeptide has a structure represented by VH1-L1-VH2-L2-VL2-L3-VL1-Fc and the second polypeptide has a structure represented by Fc; VL1-VL2-VH2-VH1; VH1-VH2-VL2-VL1; VL1-L1-VL2-L2-VH2-L3-VH1; VH1-L1-VH2-L2-VL2-L3-VL1; VL1-VL2-VH2-VH1-Fc; VH1-VH2-VL2-VL1-Fc; VL1-L1-VL2-L2-VH2-L3-VH1-Fc; VH1-L1-VH2-L2-VL2-L3-VL1-Fc; VL1-L1-VL2-L2-VH2-L3-VH1-L4-Fc; VH1-L1-VH2-L2-VL2-L3-VL1-L4-Fc; VL1-VL2-VH2-VH1-CH1; VH1-VH2-VL2-VL1-CH1; VL1-VL2-VH2-VH1-CL; VH1-VH2-VL2-VL1-CL; VL1-VL2-VH2-VH1-CH1-CL; VH1-VH2-VL2-VL1-CH1-CL; VL1-VL2-VH2-VH1-CL-CH1; VH1-VH2-VL2-VL1-CL-CH1; VL1-L1-VL2-L2-VH2-L3-VH1-L4-CH1; VH1-L1-VH2-L2-VL2-L3-VL1-L4-CH1; VL1-L1- VL2-L2-VH2-L3-VH1-L4-CL; VH1-L1-VH2-L2-VL2-L3-VL1-L4-CL; VL1-L1-VL2-L2-VH2-L3-VH1-L4-CH1-L5- CL; VH1-L1-VH2-L2-VL2-L3-VL1-L4-CH1-L5-CL; VL1-L1-VL2-L2-VH2-L3-VH1-L4-CL-L5-CH1; VH1-L1-VH2- L2-VL2-L3-VL1-L4-CL-L5-CH1; VL1-VL2-VH2-VH1-CH1-Fc; VH1-VH2-VL2-VL1-CH1-Fc; VL1-VL2-VH2-VH1-CL-Fc; VH1-VH2-VL2-VL1-CL-Fc; VL1-VL2-VH2-VH1-CH1-CL-Fc; VH1-VH2-VL2-VL1-CH1-CL-Fc; VL1-VL2-VH2-VH1-CL-CH1-Fc; VH1-VH2-VL2-VL1-CL-CH1-Fc; VL1-L1-VL2-L2-VH2-L3-VH1-L4-CH1-Fc; VH1-L1-VH2-L2-VL2-L3-VL1-L4-CH1-Fc; VL1-L1-VL2-L2-VH2-L3-VH1-L4-CL-Fc; VH1-L1-VH2-L2-VL2-L3-VL1-L4-CL-Fc; VL1-L1-VL2-L2-VH2-L3-VH1-L4-CH1-L5-CL-Fc; VH1-L1-VH2-L2-VL2-L3-VL1-L4-CH1-L5-CL-Fc; VL1-L1-VL2-L2-VH2-L3-VH1-L4-CL-L5-CH1-Fc; or VH1-L1-VH2-L2-VL2-L3-VL1-L4-CL-L5-CH1-Fc. In some aspects, the first polypeptide has a structure represented by VL1-L1-VL2-L2-VH2-L3-VH1-L4-Fc and the second polypeptide has a structure represented by Fc; VL1-VL2-VH2-VH1; VH1-VH2-VL2-VL1; VL1-L1-VL2-L2-VH2-L3-VH1; VH1-L1-VH2-L2-VL2-L3-VL1; VL1-VL2-VH2-VH1-Fc; VH1-VH2-VL2-VL1-Fc; VL1-L1-VL2-L2-VH2-L3-VH1-Fc; VH1-L1-VH2-L2-VL2-L3-VL1-Fc; VL1-L1-VL2-L2-VH2-L3-VH1-L4-Fc; VH1-L1-VH2-L2-VL2-L3-VL1-L4-Fc; VL1-VL2-VH2-VH1-CH1; VH1-VH2-VL2-VL1-CH1; VL1-VL2-VH2-VH1-CL; VH1-VH2-VL2-VL1-CL; VL1-VL2-VH2-VH1-CH1-CL; VH1-VH2-VL2-VL1-CH1-CL; VL1-VL2-VH2-VH1-CL-CH1; VH1-VH2-VL2-VL1-CL-CH1; VL1-L1-VL2-L2-VH2-L3-VH1-L4-CH1; VH1-L1-VH2-L2-VL2-L3-VL1-L4-CH1; VL1-L1-VL2-L2-VH2-L3-VH1-L4-CL; VH1-L1-VH2-L2-VL2-L3-VL1-L4-CL; VL1-L1-VL2-L2-VH2-L3-VH1-L4-CH1-L5-CL; VH1-L1-VH2-L2-VL2- L3-VL1-L4-CH1-L5-CL; VL1-L1-VL2-L2-VH2-L3-VH1-L4-CL-L5-CH1; VH1-L1-VH2-L2-VL2-L3-VL1-L4-CL-L5-CH1; VL1-VL2-VH2-VH1-CH1-Fc; VH1-VH2-VL2-VL1-CH1-Fc; VL1-VL2-VH2-VH1-CL-Fc; VH1-VH2-VL2-VL1-CL-Fc; VL1-VL2-VH2-VH1-CH1-CL-Fc; VH1-VH2-VL2-VL1-CH1-CL-Fc; VL1-VL2-VH2-VH1-CL-CH1-Fc; VH1-VH2-VL2-VL1-CL-CH1-Fc; VL1-L1-VL2-L2-VH2-L3-VH1-L4-CH1-Fc; VH1-L1-VH2-L2-VL2-L3-VL1-L4-CH1-Fc; VL1-L1-VL2-L2-VH2-L3-VH1-L4-CL-Fc; VH1-L1-VH2-L2-VL2-L3-VL1-L4-CL-Fc; VL1-L1-VL2-L2-VH2-L3-VH1-L4-CH1-L5-CL-Fc; VH1-L1-VH2-L2-VL2-L3-VL1-L4-CH1-L5-CL-Fc; VL1-L1-VL2-L2-VH2-L3-VH1-L4-CL-L5-CH1-Fc; or VH1-L1-VH2-L2-VL2-L3-VL1-L4-CL-L5-CH1-Fc. In some aspects, the first polypeptide has a structure represented by VH1-L1-VH2-L2-VL2-L3-VL1-L4-Fc and the second polypeptide has a structure represented by Fc; VL1-VL2-VH2-VH1; VH1-VH2-VL2-VL1; VL1-L1-VL2-L2-VH2-L3-VH1; VH1-L1-VH2-L2-VL2-L3-VL1; VL1-VL2-VH2-VH1-Fc; VH1-VH2-VL2-VL1-Fc; VL1-L1-VL2-L2-VH2-L3-VH1-Fc; VH1-L1-VH2-L2-VL2-L3-VL1-Fc; VL1-L1-VL2-L2-VH2-L3-VH1-L4-Fc; VH1-L1-VH2-L2-VL2-L3-VL1-L4-Fc; VL1-VL2-VH2-VH1-CH1; VH1-VH2-VL2-VL1-CH1; VL1-VL2-VH2-VH1-CL; VH1-VH2-VL2-VL1-CL; VL1-VL2-VH2-VH1-CH1-CL; VH1-VH2-VL2-VL1-CH1-CL; VL1-VL2-VH2-VH1-CL-CH1; VH1-VH2-VL2-VL1-CL-CH1; VL1-L1-VL2-L2-VH2-L3-VH1-L4-CH1; VH1-L1-VH2-L2-VL2-L3-VL1-L4-CH1; VL1-L1-VL2-L2-VH2-L3-VH1-L4-CL; VH1- L1-VH2-L2-VL2-L3-VL1-L4-CL; VL1-L1-VL2-L2-VH2-L3-VH1-L4-CH1-L5-CL; VH1-L1-VH2-L2-VL2-L3-VL1- L4-CH1-L5-CL; VL1-L1-VL2-L2-VH2-L3-VH1-L4-CL-L5-CH1; VH1-L1-VH2-L2-VL2-L3-VL1-L4-CL-L5-CH1; VL1-VL2-VH2-VH1-CH1-Fc; VH1-VH2-VL2-VL1-CH1-Fc; VL1-VL2-VH2-VH1-CL-Fc; VH1-VH2-VL2-VL1-CL-Fc; VL1-VL2-VH2-VH1-CH1-CL-Fc; VH1-VH2-VL2-VL1-CH1-CL-Fc; VL1-VL2-VH2-VH1-CL-CH1-Fc; VH1-VH2-VL2-VL1-CL-CH1-Fc; VL1-L1-VL2-L2-VH2-L3-VH1-L4-CH1-Fc; VH1-L1-VH2-L2-VL2-L3-VL1-L4-CH1-Fc; VL1-L1-VL2-L2-VH2-L3-VH1-L4-CL-Fc; VH1-L1-VH2-L2-VL2-L3-VL1-L4-CL-Fc; VL1-L1-VL2-L2-VH2-L3-VH1-L4-CH1-L5-CL-Fc; VH1-L1-VH2-L2-VL2-L3-VL1-L4-CH1-L5-CL-Fc; VL1-L1-VL2-L2-VH2-L3-VH1-L4-CL- L5-CH1-Fc; or VH1-L1-VH2-L2-VL2-L3-VL1-L4-CL-L5-CH1-Fc. In some aspects, the first polypeptide has a structure represented by VL1-VL2-VH2-VH1-CH1 and the second polypeptide has a structure represented by Fc; VL1-VL2-VH2-VH1; VH1-VH2-VL2-VL1; VL1-L1-VL2-L2-VH2-L3-VH1; VH1-L1-VH2-L2-VL2-L3-VL1; VL1-VL2-VH2-VH1-Fc; VH1-VH2-VL2-VL1-Fc; VL1-L1-VL2-L2-VH2-L3-VH1-Fc; VH1-L1-VH2-L2-VL2-L3-VL1-Fc; VL1-L1-VL2-L2-VH2-L3-VH1-L4-Fc; VH1-L1-VH2-L2-VL2-L3-VL1-L4-Fc; VL1-VL2-VH2-VH1-CH1; VH1-VH2-VL2-VL1-CH1; VL1-VL2-VH2-VH1-CL; VH1-VH2-VL2-VL1-CL; VL1-VL2-VH2-VH1-CH1-CL; VH1-VH2-VL2-VL1-CH1-CL; VL1-VL2-VH2-VH1-CL-CH1; VH1-VH2-VL2-VL1-CL-CH1; VL1-L1-VL2-L2-VH2-L3-VH1-L4-CH1; VH1-L1-VH2-L2-VL2-L3-VL1-L4-CH1; VL1-L1-VL2-L2-VH2-L3-VH1-L4-CL; VH1-L1-VH2-L2-VL2-L3-VL1-L4-CL; VL1-L1-VL2-L2-VH2-L3-VH1-L4-CH1-L5-CL; VH1-L1-VH2-L2-VL2-L3-VL1-L4-CH1-L5-CL; VL1-L1-VL2-L2-VH2-L3-VH1-L4-CL-L5-CH1; VH1-L1-VH2-L2-VL2-L3-VL1-L4-CL-L5-CH1; VL1-VL2-VH2-VH1-CH1-Fc; VH1-VH2-VL2-VL1-CH1-Fc; VL1-VL2-VH2-VH1-CL-Fc; VH1-VH2-VL2-VL1-CL-Fc; VL1-VL2-VH2-VH1-CH1-CL-Fc; VH1-VH2-VL2-VL1-CH1-CL-Fc; VL1-VL2-VH2-VH1-CL-CH1-Fc; VH1-VH2-VL2-VL1-CL-CH1-Fc; VL1-L1-VL2-L2-VH2-L3-VH1-L4-CH1-Fc; VH1-L1-VH2-L2-VL2-L3-VL1-L4-CH1-Fc; VL1-L1-VL2-L2-VH2-L3- VH1-L4-CL-Fc; VH1-L1-VH2-L2-VL2-L3-VL1-L4-CL-Fc; VL1-L1-VL2-L2-VH2-L3-VH1-L4-CH1-L5-CL-Fc; VH1-L1-VH2-L2-VL2-L3-VL1-L4-CH1-L5-CL-Fc; VL1-L1-VL2-L2-VH2-L3-VH1-L4-CL-L5-CH1-Fc; or VH1-L1-VH2-L2-VL2-L3-VL1-L4-CL-L5-CH1-Fc. In some aspects, the first polypeptide has a structure represented by VH1-VH2-VL2-VL1-CH1 and the second polypeptide has a structure represented by Fc; VL1-VL2-VH2-VH1; VH1-VH2-VL2-VL1; VL1-L1-VL2-L2-VH2-L3-VH1; VH1-L1-VH2-L2-VL2-L3-VL1; VL1-VL2-VH2-VH1-Fc; VH1-VH2-VL2-VL1-Fc; VL1-L1-VL2-L2-VH2-L3-VH1-Fc; VH1-L1-VH2-L2-VL2-L3-VL1-Fc; VL1-L1-VL2-L2-VH2-L3-VH1-L4-Fc; VH1-L1-VH2-L2-VL2-L3-VL1-L4-Fc; VL1-VL2-VH2-VH1-CH1; VH1-VH2-VL2-VL1-CH1; VL1-VL2-VH2-VH1-CL; VH1-VH2-VL2-VL1-CL; VL1-VL2-VH2-VH1-CH1-CL; VH1-VH2-VL2-VL1-CH1-CL; VL1-VL2-VH2-VH1-CL-CH1; VH1-VH2-VL2-VL1-CL-CH1; VL1-L1-VL2-L2-VH2-L3-VH1-L4-CH1; VH1-L1-VH2-L2-VL2-L3-VL1-L4-CH1; VL1-L1-VL2-L2-VH2-L3-VH1-L4-CL; VH1-L1-VH2-L2-VL2-L3-VL1-L4-CL; VL1-L1-VL2-L2-VH2-L3- VH1-L4-CH1-L5-CL; VH1-L1-VH2-L2-VL2-L3-VL1-L4-CH1-L5-CL; VL1-L1-VL2-L2-VH2-L3-VH1-L4-CL-L5-CH1; VH1-L1-VH2-L2-VL2-L3-VL1-L4-CL-L5-CH1; VL1-VL2-VH2-VH1-CH1-Fc; VH1-VH2-VL2-VL1-CH1-Fc; VL1-VL2-VH2-VH1-CL-Fc; VH1-VH2-VL2-VL1-CL-Fc; VL1-VL2-VH2-VH1-CH1-CL-Fc; VH1-VH2-VL2-VL1-CH1-CL-Fc; VL1-VL2-VH2-VH1-CL-CH1-Fc; VH1-VH2-VL2-VL1-CL-CH1-Fc; VL1-L1-VL2-L2-VH2-L3-VH1-L4-CH1-Fc; VH1-L1-VH2-L2-VL2-L3-VL1-L4-CH1-Fc; VL1-L1-VL2-L2-VH2-L3-VH1-L4-CL-Fc; VH1-L1-VH2-L2-VL2-L3-VL1-L4-CL-Fc; VL1-L1-VL2-L2-VH2-L3-VH1-L4-CH1-L5-CL-Fc; VH1-L1-VH2-L2-VL2-L3-VL1-L4-CH1-L5-CL-Fc; VL1-L1-VL2-L2-VH2-L3-VH1-L4-CL-L5-CH1-Fc; or VH1-L1-VH2-L2-VL2-L3-VL1-L4-CL-L5-CH1-Fc. In some aspects, the first polypeptide has a structure represented by VL1-VL2-VH2-VH1-CL and the second polypeptide has a structure represented by Fc; VL1-VL2-VH2-VH1; VH1-VH2-VL2-VL1; VL1-L1-VL2-L2-VH2-L3-VH1; VH1-L1-VH2-L2-VL2-L3-VL1; VL1-VL2-VH2-VH1-Fc; VH1-VH2-VL2-VL1-Fc; VL1-L1-VL2-L2-VH2-L3-VH1-Fc; VH1-L1-VH2-L2-VL2-L3-VL1-Fc; VL1-L1-VL2-L2-VH2-L3-VH1-L4-Fc; VH1-L1-VH2-L2-VL2-L3-VL1-L4- Fc; VL1-VL2-VH2-VH1-CH1; VH1-VH2-VL2-VL1-CH1; VL1-VL2-VH2-VH1-CL; VH1-VH2-VL2-VL1-CL; VL1-VL2-VH2-VH1-CH1-CL; VH1-VH2-VL2-VL1-CH1-CL; VL1-VL2-VH2-VH1-CL-CH1; VH1-VH2-VL2-VL1-CL-CH1; VL1-L1-VL2-L2-VH2-L3-VH1-L4-CH1; VH1-L1-VH2-L2-VL2-L3-VL1-L4-CH1; VL1-L1-VL2-L2-VH2-L3-VH1-L4-CL; VH1-L1-VH2-L2-VL2-L3-VL1-L4-CL; VL1-L1-VL2-L2-VH2-L3-VH1-L4-CH1-L5-CL; VH1-L1-VH2-L2-VL2-L3-VL1-L4-CH1-L5-CL; VL1-L1-VL2-L2-VH2-L3-VH1-L4-CL-L5-CH1; VH1-L1-VH2-L2-VL2-L3-VL1- L4-CL-L5-CH1; VL1-VL2-VH2-VH1-CH1-Fc; VH1-VH2-VL2-VL1-CH1-Fc; VL1-VL2-VH2-VH1-CL-Fc; VH1-VH2-VL2-VL1-CL-Fc; VL1-VL2-VH2-VH1-CH1-CL-Fc; VH1-VH2-VL2-VL1-CH1-CL-Fc; VL1-VL2-VH2-VH1-CL-CH1-Fc; VH1-VH2-VL2-VL1-CL-CH1-Fc; VL1-L1-VL2-L2-VH2-L3-VH1-L4-CH1-Fc; VH1-L1-VH2-L2-VL2-L3-VL1-L4-CH1-Fc; VL1-L1-VL2-L2-VH2-L3-VH1-L4-CL-Fc; VH1-L1-VH2-L2-VL2-L3-VL1-L4-CL-Fc; VL1-L1-VL2-L2-VH2-L3-VH1-L4-CH1-L5-CL-Fc; VH1-L1-VH2-L2-VL2-L3-VL1-L4-CH1-L5-CL-Fc; VL1-L1-VL2-L2-VH2-L3-VH1-L4-CL-L5-CH1-Fc; or VH1-L1-VH2-L2-VL2-L3-VL1-L4-CL-L5-CH1-Fc. In some aspects, the first polypeptide has a structure represented by VH1-VH2-VL2-VL1-CL and the second polypeptide has a structure represented by Fc; VL1-VL2-VH2-VH1; VH1-VH2-VL2-VL1; VL1-L1-VL2-L2-VH2-L3-VH1; VH1-L1-VH2-L2-VL2-L3-VL1; VL1-VL2-VH2-VH1-Fe; VH1-VH2-VL2-VL1-Fc; VL1-L1-VL2-L2-VH2-L3-VH1-Fe; VH1-L1-VH2-L2-VL2-L3-VL1-Fc; VL1-L1-VL2-L2-VH2-L3-VH1-L4-Fc; VH1-L1-VH2-L2-VL2-L3-VL1-L4-Fc; VL1-VL2-VH2-VH1-CH1; VH1-VH2-VL2-VL1-CH1; VL1-VL2-VH2-VH1-CL; VH1-VH2-VL2-VL1-CL; VL1-VL2-VH2-VH1-CH1-CL; VH1-VH2-VL2-VL1-CH1-CL; VL1-VL2-VH2-VH1-CL-CH1; VH1-VH2-VL2-VL1-CL-CH1; VL1-L1-VL2-L2-VH2-L3-VH1-L4-CH1; VH1-L1-VH2-L2-VL2-L3-VL1-L4-CH1; VL1-L1-VL2-L2-VH2-L3-VH1-L4-CL; VH1- L1-VH2-L2-VL2-L3-VL1-L4-CL; VL1-L1-VL2-L2-VH2-L3-VH1-L4-CH1-L5-CL; VH1-L1-VH2-L2-VL2-L3-VL1- L4-CH1-L5-CL; VL1-L1-VL2-L2-VH2-L3-VH1-L4-CL-L5-CH1; VH1-L1-VH2-L2-VL2-L3-VL1-L4-CL-L5-CH1; VL1-VL2-VH2-VH1-CH1-Fc; VH1-VH2-VL2-VL1-CH1-Fc; VL1-VL2-VH2-VH1-CL-Fc; VH1-VH2-VL2-VL1-CL-Fc; VL1-VL2-VH2-VH1-CH1-CL-Fc; VH1-VH2-VL2-VL1-CH1-CL-Fc; VL1-VL2-VH2-VH1-CL-CH1-Fc; VH1-VH2-VL2-VL1-CL-CH1-Fc; VL1-L1-VL2-L2-VH2-L3-VH1-L4-CH1-Fc; VH1-L1-VH2-L2-VL2-L3-VL1-L4-CH1-Fc; VL1-L1-VL2-L2-VH2-L3-VH1-L4-CL-Fc; VH1-L1-VH2-L2-VL2-L3-VL1-L4-CL-Fc; VL1-L1-VL2-L2-VH2-L3-VH1-L4-CH1-L5-CL-Fc; VH1-L1-VH2-L2-VL2-L3-VL1-L4-CH1-L5-CL-Fc; VL1-L1-VL2-L2-VH2-L3-VH1-L4-CL- L5-CH1-Fc; or VH1-L1-VH2-L2-VL2-L3-VL1-L4-CL-L5-CH1-Fc. In some aspects, the first polypeptide has a structure represented by VL1-VL2-VH2-VH1-CH1-CL and the second polypeptide has a structure represented by Fc; VL1-VL2-VH2-VH1; VH1-VH2-VL2-VL1; VL1-L1-VL2-L2-VH2-L3-VH1; VH1-L1-VH2-L2-VL2-L3-VL1; VL1-VL2-VH2-VH1-Fc; VH1-VH2-VL2-VL1-Fe; VL1-L1-VL2-L2-VH2-L3-VH1-Fc; VH1-L1-VH2-L2-VL2-L3-VL1-Fc; VL1-L1-VL2-L2-VH2-L3-VH1-L4-Fc; VH1-L1-VH2-L2-VL2-L3-VL1-L4-Fc; VL1-VL2-VH2-VH1-CH1; VH1-VH2-VL2-VL1-CH1; VL1-VL2-VH2-VH1-CL; VH1-VH2-VL2-VL1-CL; VL1-VL2-VH2-VH1-CH1-CL; VH1-VH2-VL2-VL1-CH1-CL; VL1-VL2-VH2-VH1-CL-CH1; VH1-VH2-VL2-VL1-CL-CH1; VL1-L1-VL2-L2-VH2-L3-VH1-L4-CH1; VH1-L1-VH2-L2-VL2-L3-VL1-L4-CH1; VL1-L1-VL2-L2-VH2-L3-VH1-L4-CL; VH1-L1-VH2-L2-VL2- L3-VL1-L4-CL; VL1-L1-VL2-L2-VH2-L3-VH1-L4-CH1-L5-CL; VH1-L1-VH2-L2-VL2-L3-VL1-L4-CH1-L5-CL; VL1-L1-VL2-L2-VH2-L3-VH1-L4-CL-L5-CH1; VH1-L1-VH2-L2-VL2-L3-VL1-L4-CL-L5-CH1; VL1-VL2-VH2-VH1-CH1-Fc; VH1-VH2-VL2-VL1-CH1-Fc; VL1-VL2-VH2-VH1-CL-Fc; VH1-VH2-VL2-VL1-CL-Fc; VL1-VL2-VH2-VH1-CH1-CL-Fc; VH1-VH2-VL2-VL1-CH1-CL-Fc; VL1-VL2-VH2-VH1-CL-CH1-Fc; VH1-VH2-VL2-VL1-CL-CH1-Fc; VL1-L1-VL2-L2-VH2-L3-VH1-L4-CH1-Fc; VH1-L1-VH2-L2-VL2-L3-VL1-L4-CH1-Fc; VL1-L1-VL2-L2-VH2-L3-VH1-L4-CL-Fc; VH1-L1-VH2-L2-VL2-L3-VL1-L4-CL-Fc; VL1-L1-VL2-L2-VH2-L3-VH1-L4-CH1-L5-CL- Fc; VH1-L1-VH2-L2-VL2-L3-VL1-L4-CH1-L5-CL-Fc; VL1-L1-VL2-L2-VH2-L3-VH1-L4-CL-L5-CH1-Fc; or VH1-L1-VH2-L2-VL2-L3-VL1-L4-CL-L5-CH1-Fc. In some aspects, the first polypeptide has a structure represented by VH1-VH2-VL2-VL1-CH1-CL and the second polypeptide has a structure represented by Fc; VL1-VL2-VH2-VH1; VH1-VH2-VL2-VL1; VL1-L1-VL2-L2-VH2-L3-VH1; VH1-L1-VH2-L2-VL2-L3-VL1; VL1-VL2-VH2-VH1-Fc; VH1-VH2-VL2-VL1-Fc; VL1-L1-VL2-L2-VH2-L3-VH1-Fc; VH1-L1-VH2-L2-VL2-L3-VL1-Fc; VL1-L1-VL2-L2-VH2-L3-VH1-L4-Fc; VH1-L1-VH2-L2-VL2-L3-VL1-L4-Fc; VL1-VL2-VH2-VH1-CH1; VH1-VH2-VL2-VL1-CH1; VL1-VL2-VH2-VH1-CL; VH1-VH2-VL2-VL1-CL; VL1-VL2-VH2-VH1-CH1-CL; VH1-VH2-VL2-VL1-CH1-CL; VL1-VL2-VH2-VH1-CL-CH1; VH1-VH2-VL2-VL1-CL-CH1; VL1-L1-VL2-L2-VH2-L3-VH1-L4-CH1; VH1-L1-VH2-L2-VL2-L3-VL1-L4-CH1; VL1-L1-VL2-L2-VH2-L3-VH1-L4-CL; VH1-L1-VH2-L2-VL2-L3-VL1-L4-CL; VL1-L1-VL2- L2-VH2-L3-VH1-L4-CH1-L5-CL; VH1-L1-VH2-L2-VL2-L3-VL1-L4-CH1-L5-CL; VL1-L1-VL2-L2-VH2-L3-VH1- L4-CL-L5-CH1; VH1-L1-VH2-L2-VL2-L3-VL1-L4-CL-L5-CH1; VL1-VL2-VH2-VH1-CH1-Fc; VH1-VH2-VL2-VL1-CH1-Fc; VL1-VL2-VH2-VH1-CL-Fc; VH1-VH2-VL2-VL1-CL-Fc; VL1-VL2-VH2-VH1-CH1-CL-Fc; VH1-VH2-VL2-VL1-CH1-CL-Fc; VL1-VL2-VH2-VH1-CL-CH1-Fc; VH1-VH2-VL2-VL1-CL-CH1-Fc; VL1-L1-VL2-L2-VH2-L3-VH1-L4-CH1-Fc; VH1-L1-VH2-L2-VL2-L3-VL1-L4-CH1-Fc; VL1-L1-VL2-L2-VH2-L3-VH1-L4-CL-Fc; VH1-L1-VH2-L2-VL2-L3-VL1-L4-CL-Fc; VL1-L1-VL2-L2-VH2-L3-VH1-L4-CH1-L5-CL-Fc; VH1-L1-VH2-L2-VL2-L3-VL1-L4-CH1-L5-CL-Fc; VL1-L1-VL2-L2-VH2-L3-VH1-L4-CL-L5-CH1-Fc; or VH1-L1-VH2-L2-VL2-L3-VL1-L4-CL-L5-CH1-Fc. In some aspects, the first polypeptide has a structure represented by VL1-VL2-VH2-VH1-CL-CH1 and the second polypeptide has a structure represented by Fc; VL1-VL2-VH2-VH1; VH1-VH2-VL2-VL1; VL1-L1-VL2-L2-VH2-L3-VH1; VH1-L1-VH2-L2-VL2-L3-VL1; VL1-VL2-VH2-VH1-Fc; VH1-VH2-VL2-VL1-Fc; VL1-L1-VL2-L2-VH2-L3-VH1-Fc; VH1-L1-VH2-L2-VL2-L3-VL1-Fc; VL1-L1-VL2-L2-VH2-L3-VH1-L4-Fc; VH1-L1-VH2-L2-VL2-L3-VL1-L4-Fc; VL1-VL2-VH2-VH1-CH1; VH1-VH2-VL2-VL1-CH1; VL1-VL2-VH2-VH1-CL; VH1-VH2-VL2-VL1-CL; VL1-VL2-VH2-VH1-CH1-CL; VH1-VH2-VL2-VL1-CH1-CL; VL1-VL2-VH2-VH1-CL-CH1; VH1-VH2-VL2-VL1-CL-CH1; VL1-L1-VL2-L2-VH2-L3-VH1-L4-CH1; VH1-L1-VH2-L2-VL2-L3-VL1-L4-CH1; VL1-L1- VL2-L2-VH2-L3-VH1-L4-CL; VH1-L1-VH2-L2-VL2-L3-VL1-L4-CL; VL1-L1-VL2-L2-VH2-L3-VH1-L4-CH1-L5- CL; VH1-L1-VH2-L2-VL2-L3-VL1-L4-CH1-L5-CL; VL1-L1-VL2-L2-VH2-L3-VH1-L4-CL-L5-CH1; VH1-L1-VH2- L2-VL2-L3-VL1-L4-CL-L5-CH1; VL1-VL2-VH2-VH1-CH1-Fc; VH1-VH2-VL2-VL1-CH1-Fc; VL1-VL2-VH2-VH1-CL-Fc; VH1-VH2-VL2-VL1-CL-Fc; VL1-VL2-VH2-VH1-CH1-CL-Fc; VH1-VH2-VL2-VL1-CH1-CL-Fc; VL1-VL2-VH2-VH1-CL-CH1-Fc; VH1-VH2-VL2-VL1-CL-CH1-Fc; VL1-L1-VL2-L2-VH2-L3-VH1-L4-CH1-Fc; VH1-L1-VH2-L2-VL2-L3-VL1-L4-CH1-Fc; VL1-L1-VL2-L2-VH2-L3-VH1-L4-CL-Fc; VH1-L1-VH2-L2-VL2-L3-VL1-L4-CL-Fc; VL1-L1-VL2-L2-VH2-L3-VH1-L4-CH1-L5-CL-Fc; VH1-L1-VH2-L2-VL2-L3-VL1-L4-CH1-L5-CL-Fc; VL1-L1-VL2-L2-VH2-L3-VH1-L4-CL-L5-CH1-Fc; or VH1-L1-VH2-L2-VL2-L3-VL1-L4-CL-L5-CH1-Fc. In some aspects the first polypeptide has a structure represented by VH1-VH2-VL2-VL1-CL-CH1 and the second polypeptide has a structure represented by Fc; VL1-VL2-VH2-VH1; VH1-VH2-VL2-VL1; VL1-L1-VL2-L2-VH2-L3-VH1; VH1-L1-VH2-L2-VL2-L3-VL1; VL1-VL2-VH2-VH1-Fe; VH1-VH2-VL2-VL1-Fc; VL1-L1-VL2-L2-VH2-L3-VH1-Fc; VH1-L1-VH2-L2-VL2-L3-VL1-Fc; VL1-L1-VL2-L2-VH2-L3-VH1-L4-Fc; VH1-L1-VH2-L2-VL2-L3-VL1-L4-Fc; VL1-VL2-VH2-VH1-CH1; VH1-VH2-VL2-VL1-CH1; VL1-VL2-VH2-VH1-CL; VH1-VH2-VL2-VL1-CL; VL1-VL2-VH2-VH1-CH1-CL; VH1-VH2-VL2-VL1-CH1-CL; VL1-VL2-VH2-VH1-CL-CH1; VH1-VH2-VL2-VL1-CL-CH1; VL1-L1-VL2-L2-VH2-L3-VH1-L4-CH1; VH1-L1-VH2-L2-VL2-L3-VL1-L4-CH1; VL1-L1-VL2-L2-VH2-L3-VH1-L4-CL; VH1- L1-VH2-L2-VL2-L3-VL1-L4-CL; VL1-L1-VL2-L2-VH2-L3-VH1-L4-CH1-L5-CL; VH1-L1-VH2-L2-VL2-L3-VL1- L4-CH1-L5-CL; VL1-L1-VL2-L2-VH2-L3-VH1-L4-CL-L5-CH1; VH1-L1-VH2-L2-VL2-L3-VL1-L4-CL-L5-CH1; VL1-VL2-VH2-VH1-CH1-Fe; VH1-VH2-VL2-VL1-CH1-Fc; VL1-VL2-VH2-VH1-CL-Fc; VH1-VH2-VL2-VL1-CL-Fc; VL1-VL2-VH2-VH1-CH1-CL-Fc; VH1-VH2-VL2-VL1-CH1-CL-Fc; VL1-VL2-VH2-VH1-CL-CH1-Fc; VH1-VH2-VL2-VL1-CL-CH1-Fe; VL1-L1-VL2-L2-VH2-L3-VH1-L4-CH1-Fc; VH1-L1-VH2-L2-VL2-L3-VL1-L4-CH1-Fc; VL1-L1-VL2-L2-VH2-L3-VH1-L4-CL-Fc; VH1-L1-VH2-L2-VL2-L3-VL1-L4-CL-Fc; VL1-L1-VL2-L2-VH2-L3-VH1-L4-CH1-L5-CL-Fc; VH1-L1-VH2-L2-VL2-L3-VL1-L4-CH1-L5-CL-Fc; VL1-L1-VL2-L2-VH2-L3-VH1-L4-CL- L5-CH1-Fe; or VH1-L1-VH2-L2-VL2-L3-VL1-L4-CL-L5-CH1-Fe. In some aspects, the first polypeptide has a structure represented by VL1-L1-VL2-L2-VH2-L3-VH1-L4-CH1 and the second polypeptide has a structure represented by Fc; VL1-VL2-VH2-VH1; VH1-VH2-VL2-VL1; VL1-L1-VL2-L2-VH2-L3-VH1; VH1-L1-VH2-L2-VL2-L3-VL1; VL1-VL2-VH2-VH1-Fc; VH1-VH2-VL2-VL1-Fc; VL1-L1-VL2-L2-VH2-L3-VH1-Fc; VH1-L1-VH2-L2-VL2-L3-VL1-Fe; VL1-L1-VL2-L2-VH2-L3-VH1-L4-Fe; VH1-L1-VH2-L2-VL2-L3-VL1-L4-Fe; VL1-VL2-VH2-VH1-CH1; VH1-VH2-VL2-VL1-CH1; VL1-VL2-VH2-VH1-CL; VH1-VH2-VL2-VL1-CL; VL1-VL2-VH2-VH1-CH1-CL; VH1-VH2-VL2-VL1-CH1-CL; VL1-VL2-VH2-VH1-CL-CH1; VH1-VH2-VL2-VL1-CL-CH1; VL1-L1-VL2-L2-VH2-L3-VH1-L4-CH1; VH1-L1-VH2-L2-VL2-L3-VL1-L4-CH1; VL1-L1-VL2-L2-VH2-L3-VH1-L4-CL; VH1-L1-VH2- L2-VL2-L3-VL1-L4-CL; VL1-L1-VL2-L2-VH2-L3-VH1-L4-CH1-L5-CL; VH1-L1-VH2-L2-VL2-L3-VL1-L4-CH1- L5-CL; VL1-L1-VL2-L2-VH2-L3-VH1-L4-CL-L5-CH1; VH1-L1-VH2-L2-VL2-L3-VL1-L4-CL-L5-CH1; VL1-VL2-VH2-VH1-CH1-Fc; VH1-VH2-VL2-VL1-CH1-Fc; VL1-VL2-VH2-VH1-CL-Fc; VH1-VH2-VL2-VL1-CL-Fc; VL1-VL2-VH2-VH1-CH1-CL-Fc; VH1-VH2-VL2-VL1-CH1-CL-Fc; VL1-VL2-VH2-VH1-CL-CH1-Fc; VH1-VH2-VL2-VL1-CL-CH1-Fc; VL1-L1-VL2-L2-VH2-L3-VH1-L4-CH1-Fe; VH1-L1-VH2-L2-VL2-L3-VL1-L4-CH1-Fe; VL1-L1-VL2-L2-VH2-L3-VH1-L4-CL-Fc; VH1-L1-VH2-L2-VL2-L3-VL1-L4-CL-Fc; VL1-L1-VL2-L2-VH2-L3-VH1-L4-CH1-L5-CL-Fe; VH1-L1-VH2-L2-VL2-L3-VL1-L4-CH1-L5-CL-Fc; VL1-L1-VL2-L2-VH2-L3-VH1-L4-CL-L5-CH1-Fc; or VH1-L1-VH2-L2-VL2-L3-VL1-L4-CL-L5-CH1-Fe. In some aspects, the first polypeptide has a structure represented by VH1-L1-VH2-L2-VL2-L3-VL1-L4-CH1 and the second polypeptide has a structure represented by Fc; VL1-VL2-VH2-VH1; VH1-VH2-VL2-VL1; VL1-L1-VL2-L2-VH2-L3-VH1; VH1-L1-VH2-L2-VL2-L3-VL1; VL1-VL2-VH2-VH1-Fc; VH1-VH2-VL2-VL1-Fc; VL1-L1-VL2-L2-VH2-L3-VH1-Fc; VH1-L1-VH2-L2-VL2-L3-VL1-Fc; VL1-L1-VL2-L2-VH2-L3-VH1-L4-Fc; VH1-L1-VH2-L2-VL2-L3-VL1-L4-Fe; VL1-VL2-VH2-VH1-CH1; VH1-VH2-VL2-VL1-CH1; VL1-VL2-VH2-VH1-CL; VH1-VH2-VL2-VL1-CL; VL1-VL2-VH2-VH1-CH1-CL; VH1-VH2-VL2-VL1-CH1-CL; VL1-VL2-VH2-VH1-CL-CH1; VH1-VH2-VL2-VL1-CL-CH1; VL1-L1-VL2-L2-VH2-L3-VH1-L.4-CH1; VH1-L1-VH2-L2-VL2-L3-VL1-L4-CH1; VL1-L1-VL2-L2-VH2-L3-VH1-L4-CL; VH1-L1-VH2-L2-VL2- L3-VL1-L4-CL; VL1-L1-VL2-L2-VH2-L3-VH1-L4-CH1-L5-CL; VH1-L1-VH2-L2-VL2-L3-VL1-L4-CH1-L5-CL; VL1-L1-VL2-L2-VH2-L3-VH1-L4-CL-L5-CH1; VH1-L1-VH2-L2-VL2-L3-VL1-L4-CL-L5-CH1; VL1-VL2-VH2-VH1-CH1-Fc; VH1-VH2-VL2-VL1-CH1-Fc; VL1-VL2-VH2-VH1-CL-Fc; VH1-VH2-VL2-VL1-CL-Fc; VL1-VL2-VH2-VH1-CH1-CL-Fc; VH1-VH2-VL2-VL1-CH1-CL-Fc; VL1-VL2-VH2-VH1-CL-CH1-Fc; VH1-VH2-VL2-VL1-CL-CH1-Fc; VL1-L1-VL2-L2-VH2-L3-VH1-L4-CH1-Fc; VH1-L1-VH2-L2-VL2-L3-VL1-L4-CH1-Fe; VL1-L1-VL2-L2-VH2-L3-VH1-L4-CL-Fc; VH1-L1-VH2-L2-VL2-L3-VL1-L4-CL-Fc; VL1-L1-VL2-L2-VH2-L3-VH1-L4-CH1-L5-CL- Fc; VH1-L1-VH2-L2-VL2-L3-VL1-L4-CH1-L5-CL-Fc; VL1-L1-VL2-L2-VH2-L3-VH1-L4-CL-L5-CH1-Fc; or VH1-L1-VH2-L2-VL2-L3-VL1-L4-CL-L5-CH1-Fc. In some aspects, the first polypeptide has a structure represented by VL1-L1-VL2-L2-VH2-L3-VH1-L4-CL and the second polypeptide has a structure represented by Fc; VL1-VL2-VH2-VH1; VH1-VH2-VL2-VL1; VL1-L1-VL2-L2-VH2-L3-VH1; VH1-L1-VH2-L2-VL2-L3-VL1; VL1-VL2-VH2-VH1-Fc; VH1-VH2-VL2-VL1-Fe; VL1-L1-VL2-L2-VH2-L3-VH1-Fc; VH1-L1-VH2-L2-VL2-L3-VL1-Fc; VL1-L1-VL2-L2-VH2-L3-VH1-L4-Fc; VH1-L1-VH2-L2-VL2-L3-VL1-L4-Fc; VL1-VL2-VH2-VH1-CH1; VH1-VH2-VL2-VL1-CH1; VL1-VL2-VH2-VH1-CL; VH1-VH2-VL2-VL1-CL; VL1-VL2-VH2-VH1-CH1-CL; VH1-VH2-VL2-VL1-CH1-CL; VL1-VL2-VH2-VH1-CL-CH1; VH1-VH2-VL2-VL1-CL-CH1; VL1-L1-VL2-L2-VH2-L3-VH1-L4-CH1; VH1-L1-VH2-L2-VL2-L3-VL1-L4-CH1; VL1-L1-VL2-L2-VH2-L3-VH1-L4-CL; VH1-L1-VH2-L2-VL2-L3-VL1-L4-CL; VL1-L1-VL2- L2-VH2-L3-VH1-L4-CH1-L5-CL; VH1-L1-VH2-L2-VL2-L3-VL1-L4-CH1-L5-CL; VL1-L1-VL2-L2-VH2-L3-VH1- L4-CL-L5-CH1; VH1-L1-VH2-L2-VL2-L3-VL1-L4-CL-L5-CH1; VL1-VL2-VH2-VH1-CH1-Fc; VH1-VH2-VL2-VL1-CH1-Fc; VL1-VL2-VH2-VH1-CL-Fc; VH1-VH2-VL2-VL1-CL-Fc; VL1-VL2-VH2-VH1-CH1-CL-Fc; VH1-VH2-VL2-VL1-CH1-CL-Fc; VL1-VL2-VH2-VH1-CL-CH1-Fc; VH1-VH2-VL2-VL1-CL-CH1-Fc; VL1-L1-VL2-L2-VH2-L3-VH1-L4-CH1-Fc; VH1-L1-VH2-L2-VL2-L3-VL1-L4-CH1-Fc; VL1-L1-VL2-L2-VH2-L3-VH1-L4-CL-Fc; VH1-L1-VH2-L2-VL2-L3-VL1-L4-CL-Fc; VL1-L1-VL2-L2-VH2-L3-VH1-L4-CH1-L5-CL-Fc; VH1-L1-VH2-L2-VL2-L3-VL1-L4-CH1-L5-CL-Fc; VL1-L1-VL2-L2-VH2-L3-VH1-L4-CL-L5-CH1-Fc; or VH1-L1-VH2-L2-VL2-L3-VL1-L4-CL-L5-CH1-Fc. In some aspects, the first polypeptide has a structure represented by VH1-L1-VH2-L2-VL2-L3-VL1-L4-CL and the second polypeptide has a structure represented by Fc; VL1-VL2-VH2-VH1; VH1-VH2-VL2-VL1; VL1-L1-VL2-L2-VH2-L3-VH1; VH1-L1-VH2-L2-VL2-L3-VL1; VL1-VL2-VH2-VH1-Fc; VH1-VH2-VL2-VL1-Fc; VL1-L1-VL2-L2-VH2-L3-VH1-Fc; VH1-L1-VH2-L2-VL2-L3-VL1-Fc; VL1-L1-VL2-L2-VH2-L3-VH1-L4-Fc; VH1-L1-VH2-L2-VL2-L3-VL1-L4-Fc; VL1-VL2-VH2-VH1-CH1; VH1-VH2-VL2-VL1-CH1; VL1-VL2-VH2-VH1-CL; VH1-VH2-VL2-VL1-CL; VL1-VL2-VH2-VH1-CH1-CL; VH1-VH2-VL2-VL1-CH1-CL; VL1-VL2-VH2-VH1-CL-CH1; VH1-VH2-VL2-VL1-CL-CH1; VL1-L1-VL2-L2-VH2-L3-VH1-L4-CH1; VH1-L1-VH2-L2-VL2-L3-VL1-L4-CH1; VL1-L1-VL2-L2-VH2-L3-VH1-L4-CL; VH1-L1-VH2-L2-VL2-L3-VL1-L4-CL; VL1-L1-VL2-L2-VH2-L3-VH1- L4-CH1-L5-CL; VH1-L1-VH2-L2-VL2-L3-VL1-L4-CH1-L5-CL; VL1-L1-VL2-L2-VH2-L3-VH1-L4-CL-L5-CH1; VH1-L1-VH2-L2-VL2-L3-VL1-L4-CL-L5-CH1; VL1-VL2-VH2-VH1-CH1-Fc; VH1-VH2-VL2-VL1-CH1-Fc; VL1-VL2-VH2-VH1-CL-Fc; VH1-VH2-VL2-VL1-CL-Fc; VL1-VL2-VH2-VH1-CH1-CL-Fc; VH1-VH2-VL2-VL1-CH1-CL-Fc; VL1-VL2-VH2-VH1-CL-CH1-Fc; VH1-VH2-VL2-VL1-CL-CH1-Fc; VL1-L1-VL2-L2-VH2-L3-VH1-L4-CH1-Fe; VH1-L1-VH2-L2-VL2-L3-VL1-L4-CH1-Fc; VL1-L1-VL2-L2-VH2-L3-VH1-L4-CL-Fc; VH1-L1-VH2-L2-VL2-L3-VL1-L4-CL-Fc; VL1-L1-VL2-L2-VH2-L3-VH1-L4-CH1-L5-CL-Fc; VH1-L1-VH2-L2-VL2-L3-VL1-L4-CH1-L5-CL- Fc; VL1-L1-VL2-L2-VH2-L3-VH1-L4-CL-L5-CH1-Fc; or VH1-L1-VH2-L2-VL2-L3-VL1-L4-CL-L5-CH1-Fc. In some aspects, the first polypeptide has a structure represented by VL1-L1-VL2-L2-VH2-L3-VH1-L4-CH1-L5-CL and the second polypeptide has a structure represented by Fc; VL1-VL2-VH2-VH1; VH1-VH2-VL2-VL1; VL1-L1-VL2-L2-VH2-L3-VH1; VH1-L1-VH2-L2-VL2-L3-VL1; VL1-VL2-VH2-VH1-Fc; VH1-VH2-VL2-VL1-Fc; VL1-L1-VL2-L2-VH2-L3-VH1-Fc; VH1-L1-VH2-L2-VL2-L3-VL1-Fc; VL1-L1-VL2-L2-VH2-L3-VH1-L4-Fc; VH1-L1-VH2-L2-VL2-L3-VL1-L4-Fc; VL1-VL2-VH2-VH1-CH1; VH1-VH2-VL2-VL1-CH1; VL1-VL2-VH2-VH1-CL; VH1-VH2-VL2-VL1-CL; VL1-VL2-VH2-VH1-CH1-CL; VH1-VH2-VL2-VL1-CH1-CL; VL1-VL2-VH2-VH1-CL-CH1; VH1-VH2-VL2-VL1-CL-CH1; VL1-L1-VL2-L2-VH2-L3-VH1-L4-CH1; VH1-L1-VH2-L2-VL2-L3-VL1-L4-CH1; VL1-L1- VL2-L2-VH2-L3-VH1-L4-CL; VH1-L1-VH2-L2-VL2-L3-VL1-L4-CL; VL1-L1-VL2-L2-VH2-L3-VH1-L4-CH1-L5- CL; VH1-L1-VH2-L2-VL2-L3-VL1-L4-CH1-L5-CL; VL1-L1-VL2-L2-VH2-L3-VH1-L4-CL-L5-CH1; VH1-L1-VH2- L2-VL2-L3-VL1-L4-CL-L5-CH1; VL1-VL2-VH2-VH1-CH1-Fc; VH1-VH2-VL2-VL1-CH1-Fc; VL1-VL2-VH2-VH1-CL-Fc; VH1-VH2-VL2-VL1-CL-Fc; VL1-VL2-VH2-VH1-CH1-CL-Fc; VH1-VH2-VL2-VL1-CH1-CL-Fc; VL1-VL2-VH2-VH1-CL-CH1-Fc; VH1-VH2-VL2-VL1-CL-CH1-Fc; VL1-L1-VL2-L2-VH2-L3-VH1-L4-CH1-Fc; VH1-L1-VH2-L2-VL2-L3-VL1-L4-CH1-Fc; VL1-L1-VL2-L2-VH2-L3-VH1-L4-CL-Fc; VH1-L1-VH2-L2-VL2-L3-VL1-L4-CL-Fc; VL1-L1-VL2-L2-VH2-L3-VH1-L4-CH1-L5-CL-Fc; VH1-L1-VH2-L2-VL2-L3-VL1-L4-CH1-L5-CL-Fc; VL1-L1-VL2-L2-VH2-L3-VH1-L4-CL-L5-CH1-Fc; or VH1-L1-VH2-L2-VL2-L3-VL1-L4-CL-L5-CH1-Fc. In some aspects, the first polypeptide has a structure represented by VH1-L1-VH2-L2-VL2-L3-VL1-L4-CH1-L5-CL and the second polypeptide has a structure represented by Fc; VL1-VL2-VH2-VH1; VH1-VH2-VL2-VL1; VL1-L1-VL2-L2-VH2-L3-VH1; VH1-L1-VH2-L2-VL2-L3-VL1; VL1-VL2-VH2-VH1-Fc; VH1-VH2-VL2-VL1-Fc; VL1-L1-VL2-L2-VH2-L3-VH1-Fc; VH1-L1-VH2-L2-VL2-L3-VL1-Fc; VL1-L1-VL2-L2-VH2-L3-VH1-L4-Fc; VH1-L1-VH2-L2-VL2-L3-VL1-L4-Fc; VL1-VL2-VH2-VH1-CH1; VH1-VH2-VL2-VL1-CH1; VL1-VL2-VH2-VH1-CL; VH1-VH2-VL2-VL1-CL; VL1-VL2-VH2-VH1-CH1-CL; VH1-VH2-VL2-VL1-CH1-CL; VL1-VL2-VH2-VH1-CL-CH1; VH1-VH2-VL2-VL1-CL-CH1; VL1-L1-VL2-L2-VH2-L3-VH1-L4-CH1; VH1-L1-VH2-L2-VL2-L3-VL1-L4-CH1; VL1-L1-VL2-L2- VH2-L3-VH1-L4-CL; VH1-L1-VH2-L2-VL2-L3-VL1-L4-CL; VL1-L1-VL2-L2-VH2-L3-VH1-L4-CH1-L5-CL; VH1-L1-VH2-L2-VL2-L3-VL1-L4-CH1-L5-CL; VL1-L1-VL2-L2-VH2-L3-VH1-L4-CL-L5-CH1; VH1-L1-VH2-L2-VL2- L3-VL1-L4-CL-L5-CH1; VL1-VL2-VH2-VH1-CH1-Fe; VH1-VH2-VL2-VL1-CH1-Fc; VL1-VL2-VH2-VH1-CL-Fc; VH1-VH2-VL2-VL1-CL-Fc; VL1-VL2-VH2-VH1-CH1-CL-Fc; VH1-VH2-VL2-VL1-CH1-CL-Fc; VL1-VL2-VH2-VH1-CL-CH1-Fe; VH1-VH2-VL2-VL1-CL-CH1-Fc; VL1-L1-VL2-L2-VH2-L3-VH1-L4-CH1-Fc; VH1-L1-VH2-L2-VL2-L3-VL1-L4-CH1-Fc; VL1-L1-VL2-L2-VH2-L3-VH1-L4-CL-Fc; VH1-L1-VH2-L2-VL2-L3-VL1-L4-CL-Fc; VL1-L1-VL2-L2-VH2-L3-VH1-L4-CH1-L5-CL-Fc; VH1-L1-VH2-L2-VL2-L3-VL1-L4-CH1-L5-CL-Fc; VL1-L1-VL2-L2-VH2-L3-VH1-L4-CL-L5-CH1-Fc; or VH1-L1-VH2-L2-VL2-L3-VL1-L4-CL-L5-CH1-Fc. In some aspects, the first polypeptide has a structure represented by VL1-L1-VL2-L2-VH2-L3-VH1-L4-CL-L5-CH1 and the second polypeptide has a structure represented by Fc; VL1-VL2-VH2-VH1; VH1-VH2-VL2-VL1; VL1-L1-VL2-L2-VH2-L3-VH1; VH1-L1-VH2-L2-VL2-L3-VL1; VL1-VL2-VH2-VH1-Fc; VH1-VH2-VL2-VL1-Fc; VL1-L1-VL2-L2-VH2-L3-VH1-Fc; VH1-L1-VH2-L2-VL2-L3-VL1-Fc; VL1-L1-VL2-L2-VH2-L3-VH1-L4-Fc; VH1-L1-VH2-L2-VL2-L3-VL1-L4-Fc; VL1-VL2-VH2-VH1-CH1; VH1-VH2-VL2-VL1-CH1; VL1-VL2-VH2-VH1-CL; VH1-VH2-VL2-VL1-CL; VL1-VL2-VH2-VH1-CH1-CL; VH1-VH2-VL2-VL1-CH1-CL; VL1-VL2-VH2-VH1-CL-CH1; VH1-VH2-VL2-VL1-CL-CH1; VL1-L1-VL2-L2-VH2-L3-VH1-L4-CH1; VH1-L1-VH2-L2-VL2-L3-VL1-L4-CH1; VL1-L1-VL2-L2- VH2-L3-VH1-L4-CL; VH1-L1-VH2-L2-VL2-L3-VL1-L4-CL; VL1-L1-VL2-L2-VH2-L3-VH1-L4-CH1-L5-CL; VH1-L1-VH2-L2-VL2-L3-VL1-L4-CH1-L5-CL; VL1-L1-VL2-L2-VH2-L3-VH1-L4-CL-L5-CH1; VH1-L1-VH2-L2-VL2- L3-VL1-L4-CL-L5-CH1; VL1-VL2-VH2-VH1-CH1-Fe; VH1-VH2-VL2-VL1-CH1-Fc; VL1-VL2-VH2-VH1-CL-Fc; VH1-VH2-VL2-VL1-CL-Fc; VL1-VL2-VH2-VH1-CH1-CL-Fc; VH1-VH2-VL2-VL1-CH1-CL-Fc; VL1-VL2-VH2-VH1-CL-CH1-Fe; VH1-VH2-VL2-VL1-CL-CH1-Fc; VL1-L1-VL2-L2-VH2-L3-VH1-L4-CH1-Fc; VH1-L1-VH2-L2-VL2-L3-VL1-L4-CH1-Fc; VL1-L1-VL2-L2-VH2-L3-VH1-L4-CL-Fc; VH1-L1-VH2-L2-VL2-L3-VL1-L4-CL-Fc; VL1-L1-VL2-L2-VH2-L3-VH1-L4-CH1-L5-CL-Fc; VH1-L1-VH2-L2-VL2-L3-VL1-L4-CH1-L5-CL-Fc; VL1-L1-VL2-L2-VH2-L3-VH1-L4-CL-L5-CH1-Fc; or VH1-L1-VH2-L2-VL2-L3-VL1-L4-CL-L5-CH1-Fc. In some aspects, the first polypeptide has a structure represented by VH1-L1-VH2-L2-VL2-L3-VL1-L4-CL-L5-CH1 and the second polypeptide has a structure represented by Fc; VL1-VL2-VH2-VH1; VH1-VH2-VL2-VL1; VL1-L1-VL2-L2-VH2-L3-VH1; VH1-L1-VH2-L2-VL2-L3-VL1; VL1-VL2-VH2-VH1-Fc; VH1-VH2-VL2-VL1-Fc; VL1-L1-VL2-L2-VH2-L3-VH1-Fc; VH1-L1-VH2-L2-VL2-L3-VL1-Fc; VL1-L1-VL2-L2-VH2-L3-VH1-L4-Fc; VH1-L1-VH2-L2-VL2-L3-VL1-L4-Fc; VL1-VL2-VH2-VH1-CH1; VH1-VH2-VL2-VL1-CH1; VL1-VL2-VH2-VH1-CL; VH1-VH2-VL2-VL1-CL; VL1-VL2-VH2-VH1-CH1-CL; VH1-VH2-VL2-VL1-CH1-CL; VL1-VL2-VH2-VH1-CL-CH1; VH1-VH2-VL2-VL1-CL-CH1; VL1-L1-VL2-L2-VH2-L3-VH1-L4-CH1; VH1-L1-VH2-L2-VL2-L3-VL1-L4-CH1; VL1-L1-VL2-L2- VH2-L3-VH1-L4-CL; VH1-L1-VH2-L2-VL2-L3-VL1-L4-CL; VL1-L1-VL2-L2-VH2-L3-VH1-L4-CH1-L5-CL; VH1-L1-VH2-L2-VL2-L3-VL1-L4-CH1-L5-CL; VL1-L1-VL2-L2-VH2-L3-VH1-L4-CL-L5-CH1; VH1-L1-VH2-L2-VL2- L3-VL1-L4-CL-L5-CH1; VL1-VL2-VH2-VH1-CH1-Fe; VH1-VH2-VL2-VL1-CH1-Fc; VL1-VL2-VH2-VH1-CL-Fc; VH1-VH2-VL2-VL1-CL-Fc; VL1-VL2-VH2-VH1-CH1-CL-Fc; VH1-VH2-VL2-VL1-CH1-CL-Fc; VL1-VL2-VH2-VH1-CL-CH1-Fe; VH1-VH2-VL2-VL1-CL-CH1-Fc; VL1-L1-VL2-L2-VH2-L3-VH1-L4-CH1-Fc; VH1-L1-VH2-L2-VL2-L3-VL1-L4-CH1-Fc; VL1-L1-VL2-L2-VH2-L3-VH1-L4-CL-Fc; VH1-L1-VH2-L2-VL2-L3-VL1-L4-CL-Fc; VL1-L1-VL2-L2-VH2-L3-VH1-L4-CH1-L5-CL-Fc; VH1-L1-VH2-L2-VL2-L3-VL1-L4-CH1-L5-CL-Fc; VL1-L1-VL2-L2-VH2-L3-VH1-L4-CL-L5-CH1-Fc; or VH1-L1-VH2-L2-VL2-L3-VL1-L4-CL-L5-CH1-Fc. In some aspects, the first polypeptide has a structure represented by VL1-VL2-VH2-VH1-CH1-Fc and the second polypeptide has a structure represented by Fc; VL1-VL2-VH2-VH1; VH1-VH2-VL2-VL1; VL1-L1-VL2-L2-VH2-L3-VH1; VH1-L1-VH2-L2-VL2-L3-VL1; VL1-VL2-VH2-VH1-Fe; VH1-VH2-VL2-VL1-Fc; VL1-L1-VL2-L2-VH2-L3-VH1-Fe; VH1-L1-VH2-L2-VL2-L3-VL1-Fc; VL1-L1-VL2-L2-VH2-L3-VH1-L4-Fc; VH1-L1-VH2-L2-VL2-L3-VL1-L4-Fc; VL1-VL2-VH2-VH1-CH1; VH1-VH2-VL2-VL1-CH1; VL1-VL2-VH2-VH1-CL; VH1-VH2-VL2-VL1-CL; VL1-VL2-VH2-VH1-CH1-CL; VH1-VH2-VL2-VL1-CH1-CL; VL1-VL2-VH2-VH1-CL-CH1; VH1-VH2-VL2-VL1-CL-CH1; VL1-L1-VL2-L2-VH2-L3-VH1-L4-CH1; VH1-L1-VH2-L2-VL2-L3-VL1-L4-CH1; VL1-L1-VL2-L2-VH2-L3-VH1-L4-CL; VH1- L1-VH2-L2-VL2-L3-VL1-L4-CL; VL1-L1-VL2-L2-VH2-L3-VH1-L4-CH1-L5-CL; VH1-L1-VH2-L2-VL2-L3-VL1- L4-CH1-L5-CL; VL1-L1-VL2-L2-VH2-L3-VH1-L4-CL-L5-CH1; VH1-L1-VH2-L2-VL2-L3-VL1-L4-CL-L5-CH1; VL1-VL2-VH2-VH1-CH1-Fc; VH1-VH2-VL2-VL1-CH1-Fc; VL1-VL2-VH2-VH1-CL-Fc; VH1-VH2-VL2-VL1-CL-Fc; VL1-VL2-VH2-VH1-CH1-CL-Fc; VH1-VH2-VL2-VL1-CH1-CL-Fc; VL1-VL2-VH2-VH1-CL-CH1-Fc; VH1-VH2-VL2-VL1-CL-CH1-Fc; VL1-L1-VL2-L2-VH2-L3-VH1-L4-CH1-Fc; VH1-L1-VH2-L2-VL2-L3-VL1-L4-CH1-Fc; VL1-L1-VL2-L2-VH2-L3-VH1-L4-CL-Fc; VH1-L1-VH2-L2-VL2-L3-VL1-L4-CL-Fc; VL1-L1-VL2-L2-VH2-L3-VH1-L4-CH1-L5-CL-Fc; VH1-L1-VH2-L2-VL2-L3-VL1-L4-CH1-L5-CL-Fc; VL1-L1-VL2-L2-VH2-L3-VH1-L4-CL- L5-CH1-Fc; or VH1-L1-VH2-L2-VL2-L3-VL1-L4-CL-L5-CH1-Fc. In some aspects, the first polypeptide has a structure represented by VH1-VH2-VL2-VL1-CH1-Fc and the second polypeptide has a structure represented by Fc; VL1-VL2-VH2-VH1; VH1-VH2-VL2-VL1; VL1-L1-VL2-L2-VH2-L3-VH1; VH1-L1-VH2-L2-VL2-L3-VL1; VL1-VL2-VH2-VH1-Fc; VH1-VH2-VL2-VL1-Fc; VL1-L1-VL2-L2-VH2-L3-VH1-Fc; VH1-L1-VH2-L2-VL2-L3-VL1-Fc; VL1-L1-VL2-L2-VH2-L3-VH1-L4-Fc; VH1-L1-VH2-L2-VL2-L3-VL1-L4-Fc; VL1-VL2-VH2-VH1-CH1; VH1-VH2-VL2-VL1-CH1; VL1-VL2-VH2-VH1-CL; VH1-VH2-VL2-VL1-CL; VL1-VL2-VH2-VH1-CH1-CL; VH1-VH2-VL2-VL1-CH1-CL; VL1-VL2-VH2-VH1-CL-CH1; VH1-VH2-VL2-VL1-CL-CH1; VL1-L1-VL2-L2-VH2-L3-VH1-L4-CH1; VH1-L1-VH2-L2-VL2-L3-VL1-L4-CH1; VL1-L1-VL2-L2-VH2-L3-VH1-L4-CL; VH1-L1-VH2-L2-VL2- L3-VL1-L4-CL; VL1-L1-VL2-L2-VH2-L3-VH1-L4-CH1-L5-CL; VH1-L1-VH2-L2-VL2-L3-VL1-L4-CH1-L5-CL; VL1-L1-VL2-L2-VH2-L3-VH1-L4-CL-L5-CH1; VH1-L1-VH2-L2-VL2-L3-VL1-L4-CL-L5-CH1; VL1-VL2-VH2-VH1-CH1-Fc; VH1-VH2-VL2-VL1-CH1-Fc; VL1-VL2-VH2-VH1-CL-Fc; VH1-VH2-VL2-VL1-CL-Fc; VL1-VL2-VH2-VH1-CH1-CL-Fc; VH1-VH2-VL2-VL1-CH1-CL-Fc; VL1-VL2-VH2-VH1-CL-CH1-Fc; VH1-VH2-VL2-VL1-CL-CH1-Fc; VL1-L1-VL2-L2-VH2-L3-VH1-L4-CH1-Fc; VH1-L1-VH2-L2-VL2-L3-VL1-L4-CH1-Fc; VL1-L1-VL2-L2-VH2-L3-VH1-L4-CL-Fc; VH1-L1-VH2-L2-VL2-L3-VL1-L4-CL-Fc; VL1-L1-VL2-L2-VH2-L3-VH1-L4-CH1-L5-CL- Fc; VH1-L1-VH2-L2-VL2-L3-VL1-L4-CH1-L5-CL-Fc; VL1-L1-VL2-L2-VH2-L3-VH1-L4-CL-L5-CH1-Fc; or VH1-L1-VH2-L2-VL2-L3-VL1-L4-CL-L5-CH1-Fc. In some aspects, the first polypeptide has a structure represented by VL1-VL2-VH2-VH1-CL-Fc and the second polypeptide has a structure represented by Fc; VL1-VL2-VH2-VH1; VH1-VH2-VL2-VL1; VL1-L1-VL2-L2-VH2-L3-VH1; VH1-L1-VH2-L2-VL2-L3-VL1; VL1-VL2-VH2-VH1-Fc; VH1-VH2-VL2-VL1-Fc; VL1-L1-VL2-L2-VH2-L3-VH1-Fc; VH1-L1-VH2-L2-VL2-L3-VL1-Fc; VL1-L1-VL2-L2-VH2-L3-VH1-L4-Fc; VH1-L1-VH2-L2-VL2-L3-VL1-L4-Fc; VL1-VL2-VH2-VH1-CH1; VH1-VH2-VL2-VL1-CH1; VL1-VL2-VH2-VH1-CL; VH1-VH2-VL2-VL1-CL; VL1-VL2-VH2-VH1-CH1-CL; VH1-VH2-VL2-VL1-CH1-CL; VL1-VL2-VH2-VH1-CL-CH1; VH1-VH2-VL2-VL1-CL-CH1; VL1-L1-VL2-L2-VH2-L3-VH1-L4-CH1; VH1-L1-VH2-L2-VL2-L3-VL1-L4-CH1; VL1-L1-VL2-L2-VH2-L3-VH1-L4-CL; VH1-L1-VH2-L2-VL2-L3-VL1-L4-CL; VL1-L1-VL2-L2- VH2-L3-VH1-L4-CH1-L5-CL; VH1-L1-VH2-L2-VL2-L3-VL1-L4-CH1-L5-CL; VL1-L1-VL2-L2-VH2-L3-VH1-L4- CL-L5-CH1; VH1-L1-VH2-L2-VL2-L3-VL1-L4-CL-L5-CH1; VL1-VL2-VH2-VH1-CH1-Fc; VH1-VH2-VL2-VL1-CH1-Fc; VL1-VL2-VH2-VH1-CL-Fc; VH1-VH2-VL2-VL1-CL-Fc; VL1-VL2-VH2-VH1-CH1-CL-Fc; VH1-VH2-VL2-VL1-CH1-CL-Fc; VL1-VL2-VH2-VH1-CL-CH1-Fc; VH1-VH2-VL2-VL1-CL-CH1-Fc; VL1-L1-VL2-L2-VH2-L3-VH1-L4-CH1-Fc; VH1-L1-VH2-L2-VL2-L3-VL1-L4-CH1-Fc; VL1-L1-VL2-L2-VH2-L3-VH1-L4-CL-Fc; VH1-L1-VH2-L2-VL2-L3-VL1-L4-CL-Fc; VL1-L1-VL2-L2-VH2-L3-VH1-L4-CH1-L5-CL-Fc; VH1-L1-VH2-L2-VL2-L3-VL1-L4-CH1-L5-CL-Fc; VL1-L1-VL2-L2-VH2-L3-VH1-L4-CL-L5-CH1-Fc; or VH1-L1-VH2-L2-VL2-L3-VL1-L4-CL-L5-CH1-Fc. In some aspects, the first polypeptide has a structure represented by VH1-VH2-VL2-VL1-CL-Fc and the second polypeptide has a structure represented by Fc; VL1-VL2-VH2-VH1; VH1-VH2-VL2-VL1; VL1-L1-VL2-L2-VH2-L3-VH1; VH1-L1-VH2-L2-VL2-L3-VL1; VL1-VL2-VH2-VH1-Fc; VH1-VH2-VL2-VL1-Fc; VL1-L1-VL2-L2-VH2-L3-VH1-Fc; VH1-L1-VH2-L2-VL2-L3-VL1-Fc; VL1-L1-VL2-L2-VH2-L3-VH1-L4-Fc; VH1-L1-VH2-L2-VL2-L3-VL1-L4-Fc; VL1-VL2-VH2-VH1-CH1; VH1-VH2-VL2-VL1-CH1; VL1-VL2-VH2-VH1-CL; VH1-VH2-VL2-VL1-CL; VL1-VL2-VH2-VH1-CH1-CL; VH1-VH2-VL2-VL1-CH1-CL; VL1-VL2-VH2-VH1-CL-CH1; VH1-VH2-VL2-VL1-CL-CH1; VL1-L1-VL2-L2-VH2-L3-VH1-L4-CH1; VH1-L1-VH2-L2-VL2-L3-VL1-L4-CH1; VL1-L1- VL2-L2-VH2-L3-VH1-L4-CL; VH1-L1-VH2-L2-VL2-L3-VL1-L4-CL; VL1-L1-VL2-L2-VH2-L3-VH1-L4-CH1-L5- CL; VH1-L1-VH2-L2-VL2-L3-VL1-L4-CH1-L5-CL; VL1-L1-VL2-L2-VH2-L3-VH1-L4-CL-L5-CH1; VH1-L1-VH2- L2-VL2-L3-VL1-L4-CL-L5-CH1; VL1-VL2-VH2-VH1-CH1-Fc; VH1-VH2-VL2-VL1-CH1-Fc; VL1-VL2-VH2-VH1-CL-Fc; VH1-VH2-VL2-VL1-CL-Fc; VL1-VL2-VH2-VH1-CH1-CL-Fc; VH1-VH2-VL2-VL1-CH1-CL-Fc; VL1-VL2-VH2-VH1-CL-CH1-Fc; VH1-VH2-VL2-VL1-CL-CH1-Fc; VL1-L1-VL2-L2-VH2-L3-VH1-L4-CH1-Fc; VH1-L1-VH2-L2-VL2-L3-VL1-L4-CH1-Fc; VL1-L1-VL2-L2-VH2-L3-VH1-L4-CL-Fc; VH1-L1-VH2-L2-VL2-L3-VL1-L4-CL-Fc; VL1-L1-VL2-L2-VH2-L3-VH1-L4-CH1-L5-CL-Fc; VH1-L1-VH2-L2-VL2-L3-VL1-L4-CH1-L5-CL-Fc; VL1-L1-VL2-L2-VH2-L3-VH1-L4-CL-L5-CH1-Fc; or VH1-L1-VH2-L2-VL2-L3-VL1-L4-CL-L5-CH1-Fc. In some aspects, the first polypeptide has a structure represented by VL1-VL2-VH2-VH1-CH1-CL-Fc and the second polypeptide has a structure represented by Fc; VL1-VL2-VH2-VH1; VH1-VH2-VL2-VL1; VL1-L1-VL2-L2-VH2-L3-VH1; VH1-L1-VH2-L2-VL2-L3-VL1; VL1-VL2-VH2-VH1-Fc; VH1-VH2-VL2-VL1-Fc; VL1-L1-VL2-L2-VH2-L3-VH1-Fc; VH1-L1-VH2-L2-VL2-L3-VL1-Fc; VL1-L1-VL2-L2-VH2-L3-VH1-L4-Fc; VH1-L1-VH2-L2-VL2-L3-VL1-L4-Fc; VL1-VL2-VH2-VH1-CH1; VH1-VH2-VL2-VL1-CH1; VL1-VL2-VH2-VH1-CL; VH1-VH2-VL2-VL1-CL; VL1-VL2-VH2-VH1-CH1-CL; VH1-VH2-VL2-VL1-CH1-CL; VL1-VL2-VH2-VH1-CL-CH1; VH1-VH2-VL2-VL1-CL-CH1; VL1-L1-VL2-L2-VH2-L3-VH1-L4-CH1; VH1-L1-VH2-L2-VL2-L3-VL1-L4-CH1; VL1-L1-VL2-L2-VH2-L3-VH1-L4-CL; VH1-L1-VH2-L2-VL2-L3-VL1-L4-CL; VL1-L1-VL2-L2-VH2-L3-VH1-L4-CH1-L5-CL; VH1-L1-VH2-L2-VL2- L3-VL1-L4-CH1-L5-CL; VL1-L1-VL2-L2-VH2-L3-VH1-L4-CL-L5-CH1; VH1-L1-VH2-L2-VL2-L3-VL1-L4-CL-L5-CH1; VL1-VL2-VH2-VH1-CH1-Fc; VH1-VH2-VL2-VL1-CH1-Fc; VL1-VL2-VH2-VH1-CL-Fc; VH1-VH2-VL2-VL1-CL-Fc; VL1-VL2-VH2-VH1-CH1-CL-Fc; VH1-VH2-VL2-VL1-CH1-CL-Fc; VL1-VL2-VH2-VH1-CL-CH1-Fc; VH1-VH2-VL2-VL1-CL-CH1-Fc; VL1-L1-VL2-L2-VH2-L3-VH1-L4-CH1-Fc; VH1-L1-VH2-L2-VL2-L3-VL1-L4-CH1-Fc; VL1-L1-VL2-L2-VH2-L3-VH1-L4-CL-Fc; VH1-L1-VH2-L2-VL2-L3-VL1-L4-CL-Fc; VL1-L1-VL2-L2-VH2-L3-VH1-L4-CH1-L5-CL-Fc; VH1-L1-VH2-L2-VL2-L3-VL1-L4-CH1-L5-CL-Fc; VL1-L1-VL2-L2-VH2-L3-VH1-L4-CL-L5-CH1-Fc; or VH1-L1-VH2-L2-VL2-L3-VL1-L4-CL-L5-CH1-Fc. In some aspects, the first polypeptide has a structure represented by VH1-VH2-VL2-VL1-CH1-CL-Fc and the second polypeptide has a structure represented by Fc; VL1-VL2-VH2-VH1; VH1-VH2-VL2-VL1; VL1-L1-VL2-L2-VH2-L3-VH1; VH1-L1-VH2-L2-VL2-L3-VL1; VL1-VL2-VH2-VH1-Fc; VH1-VH2-VL2-VL1-Fc; VL1-L1-VL2-L2-VH2-L3-VH1-Fe; VH1-L1-VH2-L2-VL2-L3-VL1-Fc; VL1-L1-VL2-L2-VH2-L3-VH1-L4-Fc; VH1-L1-VH2-L2-VL2-L3-VL1-L4-Fc; VL1-VL2-VH2-VH1-CH1; VH1-VH2-VL2-VL1-CH1; VL1-VL2-VH2-VH1-CL; VH1-VH2-VL2-VL1-CL; VL1-VL2-VH2-VH1-CH1-CL; VH1-VH2-VL2-VL1-CH1-CL; VL1-VL2-VH2-VH1-CL-CH1; VH1-VH2-VL2-VL1-CL-CH1; VL1-L1-VL2-L2-VH2-L3-VH1-L4-CH1; VH1-L1-VH2-L2-VL2-L3-VL1-L4-CH1; VL1-L1-VL2-L2-VH2-L3-VH1-L4-CL; VH1-L1-VH2- L2-VL2-L3-VL1-L4-CL; VL1-L1-VL2-L2-VH2-L3-VH1-L4-CH1-L5-CL; VH1-L1-VH2-L2-VL2-L3-VL1-L4-CH1- L5-CL; VL1-L1-VL2-L2-VH2-L3-VH1-L4-CL-L5-CH1; VH1-L1-VH2-L2-VL2-L3-VL1-L4-CL-L5-CH1; VL1-VL2-VH2-VH1-CH1-Fc; VH1-VH2-VL2-VL1-CH1-Fc; VL1-VL2-VH2-VH1-CL-Fc; VH1-VH2-VL2-VL1-CL-Fc; VL1-VL2-VH2-VH1-CH1-CL-Fc; VH1-VH2-VL2-VL1-CH1-CL-Fc; VL1-VL2-VH2-VH1-CL-CH1-Fc; VH1-VH2-VL2-VL1-CL-CH1-Fc; VL1-L1-VL2-L2-VH2-L3-VH1-L4-CH1-Fc; VH1-L1-VH2-L2-VL2-L3-VL1-L4-CH1-Fc; VL1-L1-VL2-L2-VH2-L3-VH1-L4-CL-Fc; VH1-L1-VH2-L2-VL2-L3-VL1-L4-CL-Fc; VL1-L1-VL2-L2-VH2-L3-VH1-L4-CH1-L5-CL-Fc; VH1-L1-VH2-L2-VL2-L3-VL1-L4-CH1-L5-CL-Fc; VL1-L1-VL2-L2-VH2-L3-VH1-L4-CL-L5-CH1-Fc; or VH1-L1-VH2-L2-VL2-L3-VL1-L4-CL-L5-CH1-Fc. In some aspects, the first polypeptide has a structure represented by VL1-VL2-VH2-VH1-CL-CH1-Fc and the second polypeptide has a structure represented by Fc; VL1-VL2-VH2-VH1; VH1-VH2-VL2-VL1; VL1-L1-VL2-L2-VH2-L3-VH1; VH1-L1-VH2-L2-VL2-L3-VL1; VL1-VL2-VH2-VH1-Fc; VH1-VH2-VL2-VL1-Fc; VL1-L1-VL2-L2-VH2-L3-VH1-Fc; VH1-L1-VH2-L2-VL2-L3-VL1-Fc; VL1-L1-VL2-L2-VH2-L3-VH1-L4-Fc; VH1-L1-VH2-L2-VL2-L3-VL1-L4-Fc; VL1-VL2-VH2-VH1-CH1; VH1-VH2-VL2-VL1-CH1; VL1-VL2-VH2-VH1-CL; VH1-VH2-VL2-VL1-CL; VL1-VL2-VH2-VH1-CH1-CL; VH1-VH2-VL2-VL1-CH1-CL; VL1-VL2-VH2-VH1-CL-CH1; VH1-VH2-VL2-VL1-CL-CH1; VL1-L1-VL2-L2-VH2-L3-VH1-L4-CH1; VH1-L1-VH2-L2-VL2-L3-VL1-L4-CH1; VL1-L1-VL2-L2-VH2-L3-VH1-L4-CL; VH1-L1-VH2-L2-VL2-L3-VL1-L4-CL; VL1-L1-VL2-L2-VH2-L3-VH1-L4-CH1-L5-CL; VH1-L1-VH2-L2-VL2-L3-VL1-L4-CH1-L5-CL; VL1-L1-VL2-L2-VH2-L3-VH1-L4-CL-L5-CH1; VH1-L1-VH2-L2-VL2-L3-VL1-L4-CL-L5-CH1; VL1-VL2-VH2-VH1-CH1-Fc; VH1-VH2-VL2-VL1-CH1-Fc; VL1-VL2-VH2-VH1-CL-Fc; VH1-VH2-VL2-VL1-CL-Fc; VL1-VL2-VH2-VH1-CH1-CL-Fc; VH1-VH2-VL2-VL1-CH1-CL-Fc; VL1-VL2-VH2-VH1-CL-CH1-Fc; VH1-VH2-VL2-VL1-CL-CH1-Fc; VL1-L1-VL2-L2-VH2-L3-VH1-L4-CH1-Fc; VH1-L1-VH2-L2-VL2-L3-VL1-L4-CH1-Fc; VL1-L1-VL2-L2-VH2-L3- VH1-L4-CL-Fc; VH1-L1-VH2-L2-VL2-L3-VL1-L4-CL-Fc; VL1-L1-VL2-L2-VH2-L3-VH1-L4-CH1-L5-CL-Fc; VH1-L1-VH2-L2-VL2-L3-VL1-L4-CH1-L5-CL-Fc; VL1-L1-VL2-L2-VH2-L3-VH1-L4-CL-L5-CH1-Fc; or VH1-L1-VH2-L2-VL2-L3-VL1-L4-CL-L5-CH1-Fc. In some aspects, the first polypeptide has a structure represented by VH1-VH2-VL2-VL1-CL-CH1-Fc and the second polypeptide has a structure represented by Fc; VL1-VL2-VH2-VH1; VH1-VH2-VL2-VL1; VL1-L1-VL2-L2-VH2-L3-VH1; VH1-L1-VH2-L2-VL2-L3-VL1; VL1-VL2-VH2-VH1-Fc; VH1-VH2-VL2-VL1-Fc; VL1-L1-VL2-L2-VH2-L3-VH1-Fc; VH1-L1-VH2-L2-VL2-L3-VL1-Fc; VL1-L1-VL2-L2-VH2-L3-VH1-L4-Fc; VH1-L1-VH2-L2-VL2-L3-VL1-L4-Fc; VL1-VL2-VH2-VH1-CH1; VH1-VH2-VL2-VL1-CH1; VL1-VL2-VH2-VH1-CL; VH1-VH2-VL2-VL1-CL; VL1-VL2-VH2-VH1-CH1-CL; VH1-VH2-VL2-VL1-CH1-CL; VL1-VL2-VH2-VH1-CL-CH1; VH1-VH2-VL2-VL1-CL-CH1; VL1-L1-VL2-L2-VH2-L3-VH1-L4-CH1; VH1-L1-VH2-L2-VL2-L3-VL1-L4-CH1; VL1-L1-VL2-L2-VH2-L3-VH1-L4-CL; VH1-L1-VH2-L2-VL2-L3-VL1-L4-CL; VL1-L1-VL2-L2-VH2- L3-VH1-L4-CH1-L5-CL; VH1-L1-VH2-L2-VL2-L3-VL1-L4-CH1-L5-CL; VL1-L1-VL2-L2-VH2-L3-VH1-L4-CL-L5-CH1; VH1-L1-VH2-L2-VL2-L3-VL1-L4-CL-L5-CH1; VL1-VL2-VH2-VH1-CH1-Fc; VH1-VH2-VL2-VL1-CH1-Fc; VL1-VL2-VH2-VH1-CL-Fc; VH1-VH2-VL2-VL1-CL-Fc; VL1-VL2-VH2-VH1-CH1-CL-Fc; VH1-VH2-VL2-VL1-CH1-CL-Fc; VL1-VL2-VH2-VH1-CL-CH1-Fc; VH1-VH2-VL2-VL1-CL-CH1-Fc; VL1-L1-VL2-L2-VH2-L3-VH1-L4-CH1-Fc; VH1-L1-VH2-L2-VL2-L3-VL1-L4-CH1-Fc; VL1-L1-VL2-L2-VH2-L3-VH1-L4-CL-Fc; VH1-L1-VH2-L2-VL2-L3-VL1-L4-CL-Fc; VL1-L1-VL2-L2-VH2-L3-VH1-L4-CH1-L5-CL-Fc; VH1-L1-VH2-L2-VL2-L3-VL1-L4-CH1-L5-CL-Fc; VL1-L1-VL2-L2-VH2-L3-VH1-L4-CL-L5-CH1-Fc; or VH1-L1-VH2-L2-VL2-L3-VL1-L4-CL-L5-CH1-Fc. In some aspects, the first polypeptide has a structure represented by VL1-L1-VL2-L2-VH2-L3-VH1-L4-CH1-Fc and the second polypeptide has a structure represented by Fc; VL1-VL2-VH2-VH1; VH1-VH2-VL2-VL1; VL1-L1-VL2-L2-VH2-L3-VH1; VH1-L1-VH2-L2-VL2-L3-VL1; VL1-VL2-VH2-VH1-Fc; VH1-VH2-VL2-VL1-Fc; VL1-L1-VL2-L2-VH2-L3-VH1-Fc; VH1-L1-VH2-L2-VL2-L3-VL1-Fc; VL1-L1-VL2-L2-VH2-L3-VH1-L4-Fc; VH1-L1-VH2-L2-VL2-L3-VL1-L4-Fc; VL1-VL2-VH2-VH1-CH1; VH1-VH2-VL2-VL1-CH1; VL1-VL2-VH2-VH1-CL; VH1-VH2-VL2-VL1-CL; VL1-VL2-VH2-VH1-CH1-CL; VH1-VH2-VL2-VL1-CH1-CL; VL1-VL2-VH2-VH1-CL-CH1; VH1-VH2-VL2-VL1-CL-CH1; VL1-L1-VL2-L2-VH2-L3-VH1-L4-CH1; VH1-L1-VH2-L2-VL2-L3-VL1-L4-CH1; VL1- L1-VL2-L2-VH2-L3-VH1-L4-CL; VH1-L1-VH2-L2-VL2-L3-VL1-L4-CL; VL1-L1-VL2-L2-VH2-L3-VH1-L4-CH1- L5-CL; VH1-L1-VH2-L2-VL2-L3-VL1-L4-CH1-L5-CL; VL1-L1-VL2-L2-VH2-L3-VH1-L4-CL-L5-CH1; VH1-L1-VH2-L2-VL2-L3-VL1-L4-CL-L5-CH1; VL1-VL2-VH2-VH1-CH1-Fc; VH1-VH2-VL2-VL1-CH1-Fc; VL1-VL2-VH2-VH1-CL-Fc; VH1-VH2-VL2-VL1-CL-Fc; VL1-VL2-VH2-VH1-CH1-CL-Fc; VH1-VH2-VL2-VL1-CH1-CL-Fc; VL1-VL2-VH2-VH1-CL-CH1-Fc; VH1-VH2-VL2-VL1-CL-CH1-Fc; VL1-L1-VL2-L2-VH2-L3-VH1-L4-CH1-Fc; VH1-L1-VH2-L2-VL2-L3-VL1-L4-CH1-Fc; VL1-L1-VL2-L2-VH2-L3-VH1-L4-CL-Fc; VH1-L1-VH2-L2-VL2-L3-VL1-L4-CL-Fc; VL1-L1-VL2-L2-VH2-L3-VH1-L4-CH1-L5-CL-Fc; VH1-L1-VH2-L2-VL2-L3-VL1-L4-CH1-L5-CL-Fc; VL1-L1-VL2-L2-VH2-L3-VH1-L4-CL-L5-CH1-Fc; or VH1-L1-VH2-L2-VL2-L3-VL1-L4-CL-L5-CH1-Fc. In some aspects, the first polypeptide has a structure represented by VH1-L1-VH2-L2-VL2-L3-VL1-L4-CH1-Fc and the second polypeptide has a structure represented by Fc; VL1-VL2-VH2-VH1; VH1-VH2-VL2-VL1; VL1-L1-VL2-L2-VH2-L3-VH1; VH1-L1-VH2-L2-VL2-L3-VL1; VL1-VL2-VH2-VH1-Fc; VH1-VH2-VL2-VL1-Fc; VL1-L1-VL2-L2-VH2-L3-VH1-Fc; VH1-L1-VH2-L2-VL2-L3-VL1-Fc; VL1-L1-VL2-L2-VH2-L3-VH1-L4-Fc; VH1-L1-VH2-L2-VL2-L3-VL1-L4- Fc; VL1-VL2-VH2-VH1-CH1; VH1-VH2-VL2-VL1-CH1; VL1-VL2-VH2-VH1-CL; VH1-VH2-VL2-VL1-CL; VL1-VL2-VH2-VH1-CH1-CL; VH1-VH2-VL2-VL1-CH1-CL; VL1-VL2-VH2-VH1-CL-CH1; VH1-VH2-VL2-VL1-CL-CH1; VL1-L1-VL2-L2-VH2-L3-VH1-L4-CH1; VH1-L1-VH2-L2-VL2-L3-VL1-L4-CH1; VL1-L1-VL2-L2-VH2-L3-VH1-L4-CL; VH1-L1-VH2-L2-VL2-L3-VL1-L4-CL; VL1-L1-VL2-L2-VH2-L3-VH1-L4-CH1-L5-CL; VH1-L1-VH2-L2-VL2-L3-VL1-L4-CH1-L5-CL; VL1-L1-VL2-L2-VH2-L3-VH1-L4-CL-L5-CH1; VH1-L1-VH2-L2-VL2-L3-VL1- L4-CL-L5-CH1; VL1-VL2-VH2-VH1-CH1-Fc; VH1-VH2-VL2-VL1-CH1-Fc; VL1-VL2-VH2-VH1-CL-Fc; VH1-VH2-VL2-VL1-CL-Fc; VL1-VL2-VH2-VH1-CH1-CL-Fc; VH1-VH2-VL2-VL1-CH1-CL-Fc; VL1-VL2-VH2-VH1-CL-CH1-Fc; VH1-VH2-VL2-VL1-CL-CH1-Fc; VL1-L1-VL2-L2-VH2-L3-VH1-L4-CH1-Fc; VH1-L1-VH2-L2-VL2-L3-VL1-L4-CH1-Fc; VL1-L1-VL2-L2-VH2-L3-VH1-L4-CL-Fc; VH1-L1-VH2-L2-VL2-L3-VL1-L4-CL-Fc; VL1-L1-VL2-L2-VH2-L3-VH1-L4-CH1-L5-CL-Fc; VH1-L1-VH2-L2-VL2-L3-VL1-L4-CH1-L5-CL-Fc; VL1-L1-VL2-L2-VH2-L3-VH1-L4-CL-L5-CH1-Fc; or VH1-L1-VH2-L2-VL2-L3-VL1-L4-CL-L5-CH1-Fc. In some aspects, the first polypeptide has a structure represented by VL1-L1-VL2-L2-VH2-L3-VH1-L4-CL-Fc and the second polypeptide has a structure represented by Fc; VL1-VL2-VH2-VH1; VH1-VH2-VL2-VL1; VL1-L1-VL2-L2-VH2-L3-VH1; VH1-L1-VH2-L2-VL2-L3-VL1; VL1-VL2-VH2-VH1-Fc; VH1-VH2-VL2-VL1-Fc; VL1-L1-VL2-L2-VH2-L3-VH1-Fc; VH1-L1-VH2-L2-VL2-L3-VL1-Fc; VL1-L1-VL2-L2-VH2-L3-VH1-L4-Fc; VH1-L1-VH2-L2-VL2-L3-VL1-L4-Fc; VL1-VL2-VH2-VH1-CH1; VH1-VH2-VL2-VL1-CH1; VL1-VL2-VH2-VH1-CL; VH1-VH2-VL2-VL1-CL; VL1-VL2-VH2-VH1-CH1-CL; VH1-VH2-VL2-VL1-CH1-CL; VL1-VL2-VH2-VH1-CL-CH1; VH1-VH2-VL2-VL1-CL-CH1; VL1-L1-VL2-L2-VH2-L3-VH1-L4-CH1; VH1-L1-VH2-L2-VL2-L3-VL1-L4-CH1; VL1-L1-VL2-L2-VH2-L3-VH1-L4-CL; VH1-L1-VH2-L2-VL2-L3-VL1-L4-CL; VL1-L1-VL2-L2-VH2-L3-VH1-L4-CH1-L5-CL; VH1-L1-VH2-L2-VL2- L3-VL1-L4-CH1-L5-CL; VL1-L1-VL2-L2-VH2-L3-VH1-L4-CL-L5-CH1; VH1-L1-VH2-L2-VL2-L3-VL1-L4-CL-L5-CH1; VL1-VL2-VH2-VH1-CH1-Fc; VH1-VH2-VL2-VL1-CH1-Fc; VL1-VL2-VH2-VH1-CL-Fc; VH1-VH2-VL2-VL1-CL-Fc; VL1-VL2-VH2-VH1-CH1-CL-Fc; VH1-VH2-VL2-VL1-CH1-CL-Fc; VL1-VL2-VH2-VH1-CL-CH1-Fc; VH1-VH2-VL2-VL1-CL-CH1-Fc; VL1-L1-VL2-L2-VH2-L3-VH1-L4-CH1-Fc; VH1-L1-VH2-L2-VL2-L3-VL1-L4-CH1-Fc; VL1-L1-VL2-L2-VH2-L3-VH1-L4-CL-Fc; VH1-L1-VH2-L2-VL2-L3-VL1-L4-CL-Fc; VL1-L1-VL2-L2-VH2-L3-VH1-L4-CH1-L5-CL-Fc; VH1-L1-VH2-L2-VL2-L3-VL1-L4-CH1-L5-CL-Fc; VL1-L1-VL2-L2-VH2-L3-VH1-L4-CL-L5-CH1-Fc; or VH1-L1-VH2-L2-VL2-L3-VL1-L4-CL-L5-CH1-Fc. In some aspects, the first polypeptide has a structure represented by VH1-L1-VH2-L2-VL2-L3-VL1-L4-CL-Fc and the second polypeptide has a structure represented by Fc; VL1-VL2-VH2-VH1; VH1-VH2-VL2-VL1; VL1-L1-VL2-L2-VH2-L3-VH1; VH1-L1-VH2-L2-VL2-L3-VL1; VL1-VL2-VH2-VH1-Fc; VH1-VH2-VL2-VL1-Fc; VL1-L1-VL2-L2-VH2-L3-VH1-Fc; VH1-L1-VH2-L2-VL2-L3-VL1-Fc; VL1-L1-VL2-L2-VH2-L3-VH1-L4-Fc; VH1-L1-VH2-L2-VL2-L3-VL1-L4-Fc; VL1-VL2-VH2-VH1-CH1; VH1-VH2-VL2-VL1-CH1; VL1-VL2-VH2-VH1-CL; VH1-VH2-VL2-VL1-CL; VL1-VL2-VH2-VH1-CH1-CL; VH1-VH2-VL2-VL1-CH1-CL; VL1-VL2-VH2-VH1-CL-CH1; VH1-VH2-VL2-VL1-CL-CH1; VL1-L1-VL2-L2-VH2-L3-VH1-L4-CH1; VH1-L1-VH2-L2-VL2-L3-VL1-L4-CH1; VL1-L1-VL2-L2-VH2-L3-VH1-L4-CL; VH1- L1-VH2-L2-VL2-L3-VL1-L4-CL; VL1-L1-VL2-L2-VH2-L3-VH1-L4-CH1-L5-CL; VH1-L1-VH2-L2-VL2-L3-VL1- L4-CH1-L5-CL; VL1-L1-VL2-L2-VH2-L3-VH1-L4-CL-L5-CH1; VH1-L1-VH2-L2-VL2-L3-VL1-L4-CL-L5-CH1; VL1-VL2-VH2-VH1-CH1-Fc; VH1-VH2-VL2-VL1-CH1-Fc; VL1-VL2-VH2-VH1-CL-Fc; VH1-VH2-VL2-VL1-CL-Fc; VL1-VL2-VH2-VH1-CH1-CL-Fc; VH1-VH2-VL2-VL1-CH1-CL-Fc; VL1-VL2-VH2-VH1-CL-CH1-Fc; VH1-VH2-VL2-VL1-CL-CH1-Fc; VL1-L1-VL2-L2-VH2-L3-VH1-L4-CH1-Fc; VH1-L1-VH2-L2-VL2-L3-VL1-L4-CH1-Fc; VL1-L1-VL2-L2-VH2-L3-VH1-L4-CL-Fc; VH1-L1-VH2-L2-VL2-L3-VL1-L4-CL-Fc; VL1-L1-VL2-L2-VH2-L3-VH1-L4-CH1-L5-CL-Fc; VH1-L1-VH2-L2-VL2-L3-VL1-L4-CH1-L5-CL-Fc; VL1-L1-VL2-L2-VH2-L3-VH1-L4-CL- L5-CH1-Fc; or VH1-L1-VH2-L2-VL2-L3-VL1-L4-CL-L5-CH1-Fc. In some aspects, the first polypeptide has a structure represented by VL1-L1-VL2-L2-VH2-L3-VH1-L4-CH1-L5-CL-Fc and the second polypeptide has a structure represented by Fc; VL1-VL2-VH2-VH1; VH1-VH2-VL2-VL1; VL1-L1-VL2-L2-VH2-L3-VH1; VH1-L1-VH2-L2-VL2-L3-VL1; VL1-VL2-VH2-VH1-Fc; VH1-VH2-VL2-VL1-Fc; VL1-L1-VL2-L2-VH2-L3-VH1-Fc; VH1-L1-VH2-L2-VL2-L3-VL1-Fc; VL1-L1-VL2-L2-VH2-L3-VH1-L4-Fc; VH1-L1-VH2-L2-VL2-L3-VL1-L4-Fc; VL1-VL2-VH2-VH1-CH1; VH1-VH2-VL2-VL1-CH1; VL1-VL2-VH2-VH1-CL; VH1-VH2-VL2-VL1-CL; VL1-VL2-VH2-VH1-CH1-CL; VH1-VH2-VL2-VL1-CH1-CL; VL1-VL2-VH2-VH1-CL-CH1; VH1-VH2-VL2-VL1-CL-CH1; VL1-L1-VL2-L2-VH2-L3-VH1-L4-CH1; VH1-L1-VH2-L2-VL2-L3-VL1-L4-CH1; VL1-L1-VL2-L2-VH2-L3-VH1-L4-CL; VH1- L1-VH2-L2-VL2-L3-VL1-L4-CL; VL1-L1-VL2-L2-VH2-L3-VH1-L4-CH1-L5-CL; VH1-L1-VH2-L2-VL2-L3-VL1- L4-CH1-L5-CL; VL1-L1-VL2-L2-VH2-L3-VH1-L4-CL-L5-CH1; VH1-L1-VH2-L2-VL2-L3-VL1-L4-CL-L5-CH1; VL1-VL2-VH2-VH1-CH1-Fc; VH1-VH2-VL2-VL1-CH1-Fc; VL1-VL2-VH2-VH1-CL-Fc; VH1-VH2-VL2-VL1-CL-Fc; VL1-VL2-VH2-VH1-CH1-CL-Fc; VH1-VH2-VL2-VL1-CH1-CL-Fc; VL1-VL2-VH2-VH1-CL-CH1-Fc; VH1-VH2-VL2-VL1-CL-CH1-Fc; VL1-L1-VL2-L2-VH2-L3-VH1-L4-CH1-Fc; VH1-L1-VH2-L2-VL2-L3-VL1-L4-CH1-Fc; VL1-L1-VL2-L2-VH2-L3-VH1-L4-CL-Fc; VH1-L1-VH2-L2-VL2-L3-VL1-L4-CL-Fc; VL1-L1-VL2-L2-VH2-L3-VH1-L4-CH1-L5-CL-Fc; VH1-L1-VH2-L2-VL2-L3-VL1-L4-CH1-L5-CL-Fc; VL1-L1-VL2-L2-VH2-L3-VH1-L4-CL- L5-CH1-Fe; or VH1-L1-VH2-L2-VL2-L3-VL1-L4-CL-L5-CH1-Fc. In some aspects, the first polypeptide has a structure represented by VH1-L1-VH2-L2-VL2-L3-VL1-L4-CH1-L5-CL-Fc and the second polypeptide has a structure represented by Fc; VL1-VL2-VH2-VH1; VH1-VH2-VL2-VL1; VL1-L1-VL2-L2-VH2-L3-VH1; VH1-L1-VH2-L2-VL2-L3-VL1; VL1-VL2-VH2-VH1-Fe; VH1-VH2-VL2-VL1-Fc; VL1-L1-VL2-L2-VH2-L3-VH1-Fc; VH1-L1-VH2-L2-VL2-L3-VL1-Fc; VL1-L1-VL2-L2-VH2-L3-VH1-L4-Fc; VH1-L1-VH2-L2-VL2-L3-VL1-L4-Fc; VL1-VL2-VH2-VH1-CH1; VH1-VH2-VL2-VL1-CH1; VL1-VL2-VH2-VH1-CL; VH1-VH2-VL2-VL1-CL; VL1-VL2-VH2-VH1-CH1-CL; VH1-VH2-VL2-VL1-CH1-CL; VL1-VL2-VH2-VH1-CL-CH1; VH1-VH2-VL2-VL1-CL-CH1; VL1-L1-VL2-L2-VH2-L3-VH1-L4-CH1; VH1-L1-VH2-L2-VL2-L3-VL1-L4-CH1; VL1-L1-VL2-L2-VH2-L3-VH1-L4-CL; VH1- L1-VH2-L2-VL2-L3-VL1-L4-CL; VL1-L1-VL2-L2-VH2-L3-VH1-L4-CH1-L5-CL; VH1-L1-VH2-L2-VL2-L3-VL1- L4-CH1-L5-CL; VL1-L1-VL2-L2-VH2-L3-VH1-L4-CL-L5-CH1; VH1-L1-VH2-L2-VL2-L3-VL1-L4-CL-L5-CH1; VL1-VL2-VH2-VH1-CH1-Fe; VH1-VH2-VL2-VL1-CH1-Fc; VL1-VL2-VH2-VH1-CL-Fc; VH1-VH2-VL2-VL1-CL-Fc; VL1-VL2-VH2-VH1-CH1-CL-Fc; VH1-VH2-VL2-VL1-CH1-CL-Fc; VL1-VL2-VH2-VH1-CL-CH1-Fc; VH1-VH2-VL2-VL1-CL-CH1-Fe; VL1-L1-VL2-L2-VH2-L3-VH1-L4-CH1-Fc; VH1-L1-VH2-L2-VL2-L3-VL1-L4-CH1-Fc; VL1-L1-VL2-L2-VH2-L3-VH1-L4-CL-Fc; VH1-L1-VH2-L2-VL2-L3-VL1-L4-CL-Fc; VL1-L1-VL2-L2-VH2-L3-VH1-L4-CH1-L5-CL-Fc; VH1-L1-VH2-L2-VL2-L3-VL1-L4-CH1-L5-CL-Fc; VL1-L1-VL2-L2-VH2-L3-VH1-L4-CL- L5-CH1-Fe; or VH1-L1-VH2-L2-VL2-L3-VL1-L4-CL-L5-CH1-Fe. In some aspects, the first polypeptide has a structure represented by VL1-L1-VL2-L2-VH2-L3-VH1-L4-CL-L5-CH1-Fc and the second polypeptide has a structure represented by Fc; VL1-VL2-VH2-VH1; VH1-VH2-VL2-VL1; VL1-L1-VL2-L2-VH2-L3-VH1; VH1-L1-VH2-L2-VL2-L3-VL1; VL1-VL2-VH2-VH1-Fe; VH1-VH2-VL2-VL1-Fc; VL1-L1-VL2-L2-VH2-L3-VH1-Fc; VH1-L1-VH2-L2-VL2-L3-VL1-Fc; VL1-L1-VL2-L2-VH2-L3-VH1-L4-Fc; VH1-L1-VH2-L2-VL2-L3-VL1-L4-Fc; VL1-VL2-VH2-VH1-CH1; VH1-VH2-VL2-VL1-CH1; VL1-VL2-VH2-VH1-CL; VH1-VH2-VL2-VL1-CL; VL1-VL2-VH2-VH1-CH1-CL; VH1-VH2-VL2-VL1-CH1-CL; VL1-VL2-VH2-VH1-CL-CH1; VH1-VH2-VL2-VL1-CL-CH1; VL1-L1-VL2-L2-VH2-L3-VH1-L4-CH1; VH1-L1-VH2-L2-VL2-L3-VL1-L4-CH1; VL1-L1-VL2-L2-VH2-L3-VH1-L4-CL; VH1- L1-VH2-L2-VL2-L3-VL1-L4-CL; VL1-L1-VL2-L2-VH2-L3-VH1-L4-CH1-L5-CL; VH1-L1-VH2-L2-VL2-L3-VL1- L4-CH1-L5-CL; VL1-L1-VL2-L2-VH2-L3-VH1-L4-CL-L5-CH1; VH1-L1-VH2-L2-VL2-L3-VL1-L4-CL-L5-CH1; VL1-VL2-VH2-VH1-CH1-Fe; VH1-VH2-VL2-VL1-CH1-Fc; VL1-VL2-VH2-VH1-CL-Fc; VH1-VH2-VL2-VL1-CL-Fc; VL1-VL2-VH2-VH1-CH1-CL-Fc; VH1-VH2-VL2-VL1-CH1-CL-Fc; VL1-VL2-VH2-VH1-CL-CH1-Fc; VH1-VH2-VL2-VL1-CL-CH1-Fe; VL1-L1-VL2-L2-VH2-L3-VH1-L4-CH1-Fc; VH1-L1-VH2-L2-VL2-L3-VL1-L4-CH1-Fc; VL1-L1-VL2-L2-VH2-L3-VH1-L4-CL-Fc; VH1-L1-VH2-L2-VL2-L3-VL1-L4-CL-Fc; VL1-L1-VL2-L2-VH2-L3-VH1-L4-CH1-L5-CL-Fc; VH1-L1-VH2-L2-VL2-L3-VL1-L4-CH1-L5-CL-Fc; VL1-L1-VL2-L2-VH2-L3-VH1-L4-CL- L5-CH1-Fe; or VH1-L1-VH2-L2-VL2-L3-VL1-L4-CL-L5-CH1-Fe. In some aspects, the first polypeptide has a structure represented by VH1-L1-VH2-L2-VL2-L3-VL1-L4-CL-L5-CH1-Fc and the second polypeptide has a structure represented by Fc; VL1-VL2-VH2-VH1; VH1-VH2-VL2-VL1; VL1-L1-VL2-L2-VH2-L3-VH1; VH1-L1-VH2-L2-VL2-L3-VL1; VL1-VL2-VH2-VH1-Fe; VH1-VH2-VL2-VL1-Fc; VL1-L1-VL2-L2-VH2-L3-VH1-Fc; VH1-L1-VH2-L2-VL2-L3-VL1-Fc; VL1-L1-VL2-L2-VH2-L3-VH1-L4-Fc; VH1-L1-VH2-L2-VL2-L3-VL1-L4-Fc; VL1-VL2-VH2-VH1-CH1; VH1-VH2-VL2-VL1-CH1; VL1-VL2-VH2-VH1-CL; VH1-VH2-VL2-VL1-CL; VL1-VL2-VH2-VH1-CH1-CL; VH1-VH2-VL2-VL1-CH1-CL; VL1-VL2-VH2-VH1-CL-CH1; VH1-VH2-VL2-VL1-CL-CH1; VL1-L1-VL2-L2-VH2-L3-VH1-L4-CH1; VH1-L1-VH2-L2-VL2-L3-VL1-L4-CH1; VL1-L1-VL2-L2-VH2-L3-VH1-L4-CL; VH1- L1-VH2-L2-VL2-L3-VL1-L4-CL; VL1-L1-VL2-L2-VH2-L3-VH1-L4-CH1-L5-CL; VH1-L1-VH2-L2-VL2-L3-VL1- L4-CH1-L5-CL; VL1-L1-VL2-L2-VH2-L3-VH1-L4-CL-L5-CH1; VH1-L1-VH2-L2-VL2-L3-VL1-L4-CL-L5-CH1; VL1-VL2-VH2-VH1-CH1-Fc; VH1-VH2-VL2-VL1-CH1-Fc; VL1-VL2-VH2-VH1-CL-Fc; VH1-VH2-VL2-VL1-CL-Fe; VL1-VL2-VH2-VH1-CH1-CL-Fc; VH1-VH2-VL2-VL1-CH1-CL-Fc; VL1-VL2-VH2-VH1-CL-CH1-Fc; VH1-VH2-VL2-VL1-CL-CH1-Fc; VL1-L1-VL2-L2-VH2-L3-VH1-L4-CH1-Fc; VH1-L1-VH2-L2-VL2-L3-VL1-L4-CH1-Fc; VL1-L1-VL2-L2-VH2-L3-VH1-L4-CL-Fc; VH1-L1-VH2-L2-VL2-L3-VL1-L4-CL-Fc; VL1-L1-VL2-L2-VH2-L3-VH1-L4-CH1-L5-CL-Fc; VH1-L1-VH2-L2-VL2-L3-VL1-L4-CH1-L5-CL-Fc; VL1-L1-VL2-L2-VH2-L3-VH1-L4-CL- L5-CH1-Fc; or VH1-L1-VH2-L2-VL2-L3-VL1-L4-CL-L5-CH1-Fe.

[0132] In other aspects, the invention is directed to an antigen binding polypeptide comprising at least two Fc regions at the carboxy terminus or an antigen binding polypeptide complex comprising a polypeptide comprising at least two Fc regions at its carboxy terminus. The at least two Fc regions can be linked to the polypeptide via at least one amino acid linker. The at least two Fc regions can be linked to each other via at least one amino acid linker. For example, the antigen binding polypeptide or antigen binding polypeptide complex may comprise a polypeptide having a structure represented by VL1-VL2-VH2-VH1 or VH1-VH2-VL2-VL1 which has two Fc regions. In some aspects, one or both Fc regions comprise an amino acid sequence of any one of SEQ ID NOs:391-404 or an amino acid sequence having at least 80%, at least 85%, at least 90%, at least 95%, at least 96%, at least 97%, at least 98% or at least 99% identity to any one of SEQ ID NOs:391-404. In some aspects, an antigen binding polypeptide or antigen binding polypeptide complex comprises a polypeptide having a structure represented by VL1-VL2-VH2-VH1-Fc-Fc; VH1-VH2-VL2-VL1-Fc-Fc; VL1-L1-VL2-L2-VH2-L3-VH1-Fc-Fc; VH1-L1-VH2-L2-VL2-L3-VL1-Fc-Fc; VL1-L1-VL2-L2-VH2-L3-VH1-L4-Fc- Fc; VH1-L1-VH2-L2-VL2-L3-VL1-L4-Fc-Fc; VL1-L1-VL2-L2-VH2-L3-VH1-L4-Fc-L5-Fc; or VH1-L1-VH2-L2-VL2-L3-VL1-L4-Fc-L5-Fc; wherein VL1 is a first immunoglobulin light chain variable region; VL2 is a second immunoglobulin light chain variable region; VH1 is a first immunoglobulin heavy chain variable region; VH2 is a second immunoglobulin heavy chain variable region; Fc is a region comprising an immunoglobulin heavy chain constant region 2 (CH2), an immunoglobulin heavy chain constant region 3 (CH3), and optionally, an immunoglobulin hinge; and L1, L2, L3, L4 and L5 are amino acid linkers.

[0133] In other aspects, the invention is directed to an antigen binding polypeptide comprising at least two CH3 regions or an antigen binding polypeptide complex comprising a polypeptide comprising at least two CH3 regions. For example, the antigen binding polypeptide or antigen binding polypeptide complex may comprise a polypeptide having a structure represented by VL1-VL2-VH2-VH1 or VH1-VH2-VL2-VL1 which has two CH3 regions. In some aspects, one or both CH3 regions comprise an amino acid sequence of any one of SEQ ID NOs:416-419, or an amino acid sequence having at least 80%, at least 85%, at least 90%, at least 95%, at least 96%, at least 97%, at least 98%, or at least 99% identity to any one of SEQ ID NOs:416-419. In some aspects, the antigen binding polypeptide or antigen binding polypeptide complex comprises a polypeptide having a structure represented by VL1-VL2-VH2-VH1-CH3; VH1-VH2-VL2-VL1-CH3; VL1-L1-VL2-L2-VH2-L3-VH1-CH3; VH1-L1-VH2-L2-VL2-L3-VL1-CH3; VL1-L1- VL2-L2-VH2-L3-VH1-L4-CH3; VH1-L1-VH2-L2-VL2-L3-VL1-L4-CH3; VL1-VL2-VH2-VH1-CH3-CH3; VH1-VH2-VL2-VL1-CH3-CH3; VL1-L1-VL2-L2-VH2-L3-VH1-CH3-CH3; VH1-L1-VH2-L2-VL2-L3-VL1-CH3-CH3; VL1- L1-VL2-L2-VH2-L3-VH1-L4-CH3-CH3; VH1-L1-VH2-L2-VL2-L3-VL1-L4-CH3-CH3; VL1-L1-VL2-L2-VH2-L3-VH1-L4-CH3-L5-CH3; or VH1-L1-VH2-L2-VL2-L3-VL1-L4-CH3-L5-CH3; wherein VL1 is a first immunoglobulin light chain variable region; VL2 is a second immunoglobulin light chain variable region; VH1 is a first immunoglobulin heavy chain variable region; VH2 is a second immunoglobulin heavy chain variable region; CH3 is an immunoglobulin heavy chain constant region 3; and L1, L2, L3, L4 and L5 are amino acid linkers.

[0134] Any one of the first polypeptides described herein may be combined with any one of the second and/or third polypeptides described herein to form an antigen binding polypeptide complex of the invention.

[0135] All the disclosures relating to the antigen binding polypeptide structures described herein and the antigen binding polypeptide complex structures described herein apply to and can be combined with all the VH and VL regions described herein including all the target antigens described herein and all the VH and VL sequences and CDR sequences described herein.

[0136] In some aspects, the invention is directed to antigen binding polypeptides or antigen binding polypeptide complexes (e.g., antibodies or antigen binding fragments thereof) that specifically bind a viral peptide, protein, polypeptide, or a fragment thereof. In some aspects, the viral peptide, protein, polypeptide, or a fragment thereof is influenza virus neuraminidase, influenza virus hemagglutinin, human respiratory syncytial virus (RSV)-viral proteins, RSV F glycoprotein, RSV G glycoprotein, herpes simplex virus (HSV) viral proteins, herpes simplex virus glycoproteins gB, gC, gD, and gE, Chlamydia MOMP and PorB antigens, core protein, matrix protein or other protein of Dengue virus, measles virus hemagglutinin, herpes simplex virus type 2 glycoprotein gB, poliovirus 1 VP1, envelope glycoproteins of HIV 1, hepatitis B surface antigen, diptheria toxin, Streptococcus 24M epitope, gonococcal pilin, pseudorabies virus g50 (gpD), pseudorabies virus II (gpB), pseudorabies virus III (gpC), pseudorabies virus glycoprotein H, pseudorabies virus glycoprotein E, transmissible gastroenteritis glycoprotein 195, transmissible gastroenteritis matrix protein, swine rotavirus glycoprotein 38, swine parvovirus capsid protein, Serpulinahydodysenteriae protective antigen, bovine viral diarrhea glycoprotein 55, Newcastle disease virus hemagglutinin-neuraminidase, swine flu hemagglutinin, swine flu neuraminidase, foot and mouth disease virus, hog colera virus, swine influenza virus, African swine fever virus, Mycoplasma liyopneutiioniae, infectious bovine rhinotracheitis virus, infectious bovine rhinotracheitis virus glycoprotein E, glycoprotein G, infectious laryngotracheitis virus, infectious laryngotracheitis virus glycoprotein G or glycoprotein I, a glycoprotein of La Crosse virus, neonatal calf diarrhoea virus, Venezuelan equine encephalomyelitis virus, punta toro virus, murine leukemia virus, mouse mammary tumor virus, hepatitis B virus core protein and hepatitis B virus surface antigen or a fragment or derivative thereof, antigen of equine influenza virus or equine herpes virus, including equine influenza virus type A/Alaska 91 neuraminidase, equine influenza virus typeA/Miami 63 neuraminidase, equine influenza virus type A/Kentucky 81 neuraminidase equine herpes virus type 1 glycoprotein B, and equine herpes virus type 1 glycoprotein D, antigen of bovine respiratory syncytial virus or bovine parainfluenza virus, bovine respiratory syncytial virus attachment protein (BRSV G), bovine respiratory syncytial virus fusion protein (BRSV F), bovine respiratory syncytial virus nucleocapsid protein (BRSVN), bovine parainfluenza virus type 3 fusion protein, bovine parainfluenza virus type 3 hemagglutinin neuraminidase, bovine E viral diarrhoea virus glycoprotein 48 and glycoprotein 53, glycoprotein E of Dengue virus, or glycoprotein ElE2 of human hepatitis C virus. In some aspects, the antigen binding polypeptide or antigen binding polypeptide complex specifically binds at least one epitope on at least one viral protein selected from: influenza virus neumminidase, influenza virus hemagglutinin, human respiratory syncytial virus (RSV)-viral proteins, RSV F glycoprotein, RSV G glycoprotein, herpes simplex virus (HSV) viral proteins, herpes simplex virus glycoproteins gB, gC, gD, and gE, Chlamydia MOMP and PorB antigens, core protein, matrix protein or other protein of Dengue virus, measles virus hemagglutinin, herpes simplex virus type 2 glycoprotein gB, poliovirus 1 VP1, envelope glycoproteins of HIV 1, hepatitis B surface antigen, diptheria toxin, Streptococcus 24M epitope, gonococcal pilin, pseudorabies virus g50 (gpD), pseudorabies virus II (gpB), pseudorabies virus III (gpC), pseudorabies virus glycoprotein H, pseudorabies virus glycoprotein E, transmissible gastroenteritis glycoprotein 195, transmissible gastroenteritis matrix protein, swine rotavirus glycoprotein 38, swine parvovirus capsid protein, Serpulinahydodysenteriae protective antigen, bovine viral diarrhea glycoprotein 55, Newcastle disease virus hemagglutinin-neumminidase, swine flu hemagglutinin, swine flu neuraminidase, foot and mouth disease virus, hog colera virus, swine influenza virus, African swine fever virus, Mycoplasma liyopneutiioniae, infectious bovine rhinotracheitis virus, infectious bovine rhinotracheitis virus glycoprotein E, glycoprotein G, infectious laryngotracheitis virus, infectious laryngotracheitis virus glycoprotein G or glycoprotein I, a glycoprotein of La Crosse virus, neonatal calf diarrhoea virus, Venezuelan equine encephalomyelitis virus, punta toro virus, murine leukemia virus, mouse mammary tumor virus, hepatitis B virus core protein and hepatitis B virus surface antigen or a fragment or derivative thereof, antigen of equine influenza virus or equine herpes virus, including equine influenza virus type A/Alaska 91 neuraminidase, equine influenza virus typeA/Miami 63 neuraminidase, equine influenza virus type A/Kentucky 81 neuraminidase equine herpes virus type 1 glycoprotein B, and equine herpes virus type 1 glycoprotein D, antigen of bovine respiratory syncytial virus or bovine parainfluenza virus, bovine respiratory syncytial virus attachment protein (BRSV G), bovine respiratory syncytial virus fusion protein (BRSV F), bovine respiratory syncytial virus nucleocapsid protein (BRSVN), bovine parainfluenza virus type 3 fusion protein, bovine parainfluenza virus type 3 hemagglutinin neuraminidase, bovine E viral diarrhoea virus glycoprotein 48 and glycoprotein 53, glycoprotein E of Dengue virus, glycoprotein ElE2 of human hepatitis C virus. In some aspects, the antigen binding polypeptide or polypeptide comprised within the antigen binding complex may comprise a VL1, VL2, VL3, VL4, VH1, VH2, VH3, and/or VH4 that specifically binds to a viral peptide, protein, polypeptide, or a fragment thereof such as influenza virus neuraminidase, influenza virus hemagglutinin, human respiratory syncytial virus (RSV)-viral proteins, RSV F glycoprotein, RSV G glycoprotein, herpes simplex virus (HSV) viral proteins, herpes simplex virus glycoproteins gB, gC, gD, and gE, Chlamydia MOMP and PorB antigens, core protein, matrix protein or other protein of Dengue virus, measles virus hemagglutinin, herpes simplex virus type 2 glycoprotein gB, poliovirus 1 VP1, envelope glycoproteins of HIV 1, hepatitis B surface antigen, diptheria toxin, Streptococcus 24M epitope, gonococcal pilin, pseudorabies virus g50 (gpD), pseudorabies virus II (gpB), pseudorabies virus III (gpC), pseudorabies virus glycoprotein H, pseudorabies virus glycoprotein E, transmissible gastroenteritis glycoprotein 195, transmissible gastroenteritis matrix protein, swine rotavirus glycoprotein 38, swine parvovirus capsid protein, Serpulinahydodysenteriae protective antigen, bovine viral diarrhea glycoprotein 55, Newcastle disease virus hemagglutinin-neuraminidase, swine flu hemagglutinin, swine flu neuraminidase, foot and mouth disease virus, hog colera virus, swine influenza virus, African swine fever virus, Mycoplasma liyopneutiioniae, infectious bovine rhinotracheitis virus, infectious bovine rhinotracheitis virus glycoprotein E, glycoprotein G, infectious laryngotracheitis virus, infectious laryngotracheitis virus glycoprotein G or glycoprotein I, a glycoprotein of La Crosse virus, neonatal calf diarrhoea virus, Venezuelan equine encephalomyelitis virus, punta toro virus, murine leukemia virus, mouse mammary tumor virus, hepatitis B virus core protein and hepatitis B virus surface antigen or a fragment or derivative thereof, antigen of equine influenza virus or equine herpes virus, including equine influenza virus type A/Alaska 91 neuraminidase, equine influenza virus typeA/Miami 63 neuraminidase, equine influenza virus type A/Kentucky 81 neuraminidase equine herpes virus type 1 glycoprotein B, and equine herpes virus type 1 glycoprotein D, antigen of bovine respiratory syncytial virus or bovine parainfluenza virus, bovine respiratory syncytial virus attachment protein (BRSV G), bovine respiratory syncytial virus fusion protein (BRSV F), bovine respiratory syncytial virus nucleocapsid protein (BRSVN), bovine parainfluenza virus type 3 fusion protein, bovine parainfluenza virus type 3 hemagglutinin neuraminidase, bovine E viral diarrhoea virus glycoprotein 48 and glycoprotein 53, glycoprotein E of Dengue virus, glycoprotein ElE2 of human hepatitis C virus or a combination thereof. For example, the antigen binding polypeptide or polypeptide comprised within the antigen binding complex may comprise a VL1 that specifically binds to influenza virus neuraminidase, influenza virus hemagglutinin, human respiratory syncytial virus (RSV)-viral proteins, RSV F glycoprotein, RSV G glycoprotein, herpes simplex virus (HSV) viral proteins, herpes simplex virus glycoproteins gB, gC, gD, and gE, Chlamydia MOMP and PorB antigens, core protein, matrix protein or other protein of Dengue virus, measles virus hemagglutinin, herpes simplex virus type 2 glycoprotein gB, poliovirus 1 VP1, envelope glycoproteins of HIV 1, hepatitis B surface antigen, diptheria toxin, Streptococcus 24M epitope, gonococcal pilin, pseudorabies virus g50 (gpD), pseudorabies virus II (gpB), pseudorabies virus III (gpC), pseudorabies virus glycoprotein H, pseudorabies virus glycoprotein E, transmissible gastroenteritis glycoprotein 195, transmissible gastroenteritis matrix protein, swine rotavirus glycoprotein 38, swine parvovirus capsid protein, Serpulinahydodysenteriae protective antigen, bovine viral diarrhea glycoprotein 55, Newcastle disease virus hemagglutinin-neuraminidase, swine flu hemagglutinin, swine flu neuraminidase, foot and mouth disease virus, hog colera virus, swine influenza virus, African swine fever virus, Mycoplasma liyopneutiioniae, infectious bovine rhinotracheitis virus, infectious bovine rhinotracheitis virus glycoprotein E, glycoprotein G, infectious laryngotracheitis virus, infectious laryngotracheitis virus glycoprotein G or glycoprotein I, a glycoprotein of La Crosse virus, neonatal calf diarrhoea virus, Venezuelan equine encephalomyelitis virus, punta toro virus, murine leukemia virus, mouse mammary tumor virus, hepatitis B virus core protein and hepatitis B virus surface antigen or a fragment or derivative thereof, antigen of equine influenza virus or equine herpes virus, including equine influenza virus type A/Alaska 91 neuraminidase, equine influenza virus typeA/Miami 63 neuraminidase, equine influenza virus type A/Kentucky 81 neuraminidase equine herpes virus type 1 glycoprotein B, and equine herpes virus type 1 glycoprotein D, antigen of bovine respiratory syncytial virus or bovine parainfluenza virus, bovine respiratory syncytial virus attachment protein (BRSV G), bovine respiratory syncytial virus fusion protein (BRSV F), bovine respiratory syncytial virus nucleocapsid protein (BRSVN), bovine parainfluenza virus type 3 fusion protein, bovine parainfluenza virus type 3 hemagglutinin neuraminidase, bovine E viral diarrhoea virus glycoprotein 48 and glycoprotein 53, glycoprotein E of Dengue virus, glycoprotein ElE2 of human hepatitis C virus or a combination thereof. For example, the antigen binding polypeptide or polypeptide comprised within the antigen binding complex may comprise a VL2 that specifically binds to influenza virus neuraminidase, influenza virus hemagglutinin, human respiratory syncytial virus (RSV)-viral proteins, RSV F glycoprotein, RSV G glycoprotein, herpes simplex virus (HSV) viral proteins, herpes simplex virus glycoproteins gB, gC, gD, and gE, Chlamydia MOMP and PorB antigens, core protein, matrix protein or other protein of Dengue virus, measles virus hemagglutinin, herpes simplex virus type 2 glycoprotein gB, poliovirus 1 VP1, envelope glycoproteins of HIV 1, hepatitis B surface antigen, diptheria toxin, Streptococcus 24M epitope, gonococcal pilin, pseudorabies virus g50 (gpD), pseudorabies virus II (gpB), pseudorabies virus III (gpC), pseudorabies virus glycoprotein H, pseudorabies virus glycoprotein E, transmissible gastroenteritis glycoprotein 195, transmissible gastroenteritis matrix protein, swine rotavirus glycoprotein 38, swine parvovirus capsid protein, Serpulinahydodysenteriae protective antigen, bovine viral diarrhea glycoprotein 55, Newcastle disease virus hemagglutinin-neuraminidase, swine flu hemagglutinin, swine flu neuraminidase, foot and mouth disease virus, hog colera virus, swine influenza virus, African swine fever virus, Mycoplasma liyopneutiioniae, infectious bovine rhinotracheitis virus, infectious bovine rhinotracheitis virus glycoprotein E, glycoprotein G, infectious laryngotracheitis virus, infectious laryngotracheitis virus glycoprotein G or glycoprotein I, a glycoprotein of La Crosse virus, neonatal calf diarrhoea virus, Venezuelan equine encephalomyelitis virus, punta toro virus, murine leukemia virus, mouse mammary tumor virus, hepatitis B virus core protein and hepatitis B virus surface antigen or a fragment or derivative thereof, antigen of equine influenza virus or equine herpes virus, including equine influenza virus type A/Alaska 91 neuraminidase, equine influenza virus typeA/Miami 63 neuraminidase, equine influenza virus type A/Kentucky 81 neuraminidase equine herpes virus type 1 glycoprotein B, and equine herpes virus type 1 glycoprotein D, antigen of bovine respiratory syncytial virus or bovine parainfluenza virus, bovine respiratory syncytial virus attachment protein (BRSV G), bovine respiratory syncytial virus fusion protein (BRSV F), bovine respiratory syncytial virus nucleocapsid protein (BRSVN), bovine parainfluenza virus type 3 fusion protein, bovine parainfluenza virus type 3 hemagglutinin neuraminidase, bovine E viral diarrhoea virus glycoprotein 48 and glycoprotein 53, glycoprotein E of Dengue virus, glycoprotein ElE2 of human hepatitis C virus or a combination thereof. For example, the antigen binding polypeptide or polypeptide comprised within the antigen binding complex may comprise a VL3 that specifically binds to influenza virus neuraminidase, influenza virus hemagglutinin, human respiratory syncytial virus (RSV)-viral proteins, RSV F glycoprotein, RSV G glycoprotein, herpes simplex virus (HSV) viral proteins, herpes simplex virus glycoproteins gB, gC, gD, and gE, Chlamydia MOMP and PorB antigens, core protein, matrix protein or other protein of Dengue virus, measles virus hemagglutinin, herpes simplex virus type 2 glycoprotein gB, poliovirus 1 VP1, envelope glycoproteins of HIV 1, hepatitis B surface antigen, diptheria toxin, Streptococcus 24M epitope, gonococcal pilin, pseudorabies virus g50 (gpD), pseudorabies virus II (gpB), pseudorabies virus III (gpC), pseudorabies virus glycoprotein H, pseudorabies virus glycoprotein E, transmissible gastroenteritis glycoprotein 195, transmissible gastroenteritis matrix protein, swine rotavirus glycoprotein 38, swine parvovirus capsid protein, Serpulinahydodysenteriae protective antigen, bovine viral diarrhea glycoprotein 55, Newcastle disease virus hemagglutinin-neuraminidase, swine flu hemagglutinin, swine flu neuraminidase, foot and mouth disease virus, hog colera virus, swine influenza virus, African swine fever virus, Mycoplasma liyopneutiioniae, infectious bovine rhinotracheitis virus, infectious bovine rhinotracheitis virus glycoprotein E, glycoprotein G, infectious laryngotracheitis virus, infectious laryngotracheitis virus glycoprotein G or glycoprotein I, a glycoprotein of La Crosse virus, neonatal calf diarrhoea virus, Venezuelan equine encephalomyelitis virus, punta toro virus, murine leukemia virus, mouse mammary tumor virus, hepatitis B virus core protein and hepatitis B virus surface antigen or a fragment or derivative thereof, antigen of equine influenza virus or equine herpes virus, including equine influenza virus type A/Alaska 91 neuraminidase, equine influenza virus typeA/Miami 63 neuraminidase, equine influenza virus type A/Kentucky 81 neuraminidase equine herpes virus type 1 glycoprotein B, and equine herpes virus type 1 glycoprotein D, antigen of bovine respiratory syncytial virus or bovine parainfluenza virus, bovine respiratory syncytial virus attachment protein (BRSV G), bovine respiratory syncytial virus fusion protein (BRSV F), bovine respiratory syncytial virus nucleocapsid protein (BRSVN), bovine parainfluenza virus type 3 fusion protein, bovine parainfluenza virus type 3 hemagglutinin neuraminidase, bovine E viral diarrhoea virus glycoprotein 48 and glycoprotein 53, glycoprotein E of Dengue virus, glycoprotein ElE2 of human hepatitis C virus or a combination thereof. For example, the antigen binding polypeptide or polypeptide comprised within the antigen binding complex may comprise a VL4 that specifically binds to influenza virus neuraminidase, influenza virus hemagglutinin, human respiratory syncytial virus (RSV)-viral proteins, RSV F glycoprotein, RSV G glycoprotein, herpes simplex virus (HSV) viral proteins, herpes simplex virus glycoproteins gB, gC, gD, and gE, Chlamydia MOMP and PorB antigens, core protein, matrix protein or other protein of Dengue virus, measles virus hemagglutinin, herpes simplex virus type 2 glycoprotein gB, poliovirus 1 VP1, envelope glycoproteins of HIV 1, hepatitis B surface antigen, diptheria toxin, Streptococcus 24M epitope, gonococcal pilin, pseudorabies virus g50 (gpD), pseudorabies virus II (gpB), pseudorabies virus III (gpC), pseudorabies virus glycoprotein H, pseudorabies virus glycoprotein E, transmissible gastroenteritis glycoprotein 195, transmissible gastroenteritis matrix protein, swine rotavirus glycoprotein 38, swine parvovirus capsid protein, Serpulinahydodysenteriae protective antigen, bovine viral diarrhea glycoprotein 55, Newcastle disease virus hemagglutinin-neuraminidase, swine flu hemagglutinin, swine flu neuraminidase, foot and mouth disease virus, hog colera virus, swine influenza virus, African swine fever virus, Mycoplasma liyopneutiioniae, infectious bovine rhinotracheitis virus, infectious bovine rhinotracheitis virus glycoprotein E, glycoprotein G, infectious laryngotracheitis virus, infectious laryngotracheitis virus glycoprotein G or glycoprotein I, a glycoprotein of La Crosse virus, neonatal calf diarrhoea virus, Venezuelan equine encephalomyelitis virus, punta toro virus, murine leukemia virus, mouse mammary tumor virus, hepatitis B virus core protein and hepatitis B virus surface antigen or a fragment or derivative thereof, antigen of equine influenza virus or equine herpes virus, including equine influenza virus type A/Alaska 91 neuraminidase, equine influenza virus typeA/Miami 63 neuraminidase, equine influenza virus type A/Kentucky 81 neuraminidase equine herpes virus type 1 glycoprotein B, and equine herpes virus type 1 glycoprotein D, antigen of bovine respiratory syncytial virus or bovine parainfluenza virus, bovine respiratory syncytial virus attachment protein (BRSV G), bovine respiratory syncytial virus fusion protein (BRSV F), bovine respiratory syncytial virus nucleocapsid protein (BRSVN), bovine parainfluenza virus type 3 fusion protein, bovine parainfluenza virus type 3 hemagglutinin neuraminidase, bovine E viral diarrhoea virus glycoprotein 48 and glycoprotein 53, glycoprotein E of Dengue virus, glycoprotein ElE2 of human hepatitis C virus or a combination thereof. For example, the antigen binding polypeptide or polypeptide comprised within the antigen binding complex may comprise a VH1 that specifically binds to influenza virus neumminidase, influenza virus hemagglutinin, human respiratory syncytial virus (RSV)-viral proteins, RSV F glycoprotein, RSV G glycoprotein, herpes simplex virus (HSV) viral proteins, herpes simplex virus glycoproteins gB, gC, gD, and gE, Chlamydia MOMP and PorB antigens, core protein, matrix protein or other protein of Dengue virus, measles virus hemagglutinin, herpes simplex virus type 2 glycoprotein gB, poliovirus 1 VP1, envelope glycoproteins of HIV 1, hepatitis B surface antigen, diptheria toxin, Streptococcus 24M epitope, gonococcal pilin, pseudorabies virus g50 (gpD), pseudorabies virus II (gpB), pseudorabies virus III (gpC), pseudorabies virus glycoprotein H, pseudorabies virus glycoprotein E, transmissible gastroenteritis glycoprotein 195, transmissible gastroenteritis matrix protein, swine rotavirus glycoprotein 38, swine parvovirus capsid protein, Serpulinahydodysenteriae protective antigen, bovine viral diarrhea glycoprotein 55, Newcastle disease virus hemagglutinin-neumminidase, swine flu hemagglutinin, swine flu neuraminidase, foot and mouth disease virus, hog colera virus, swine influenza virus, African swine fever virus, Mycoplasma liyopneutiioniae, infectious bovine rhinotracheitis virus, infectious bovine rhinotracheitis virus glycoprotein E, glycoprotein G, infectious laryngotracheitis virus, infectious laryngotracheitis virus glycoprotein G or glycoprotein I, a glycoprotein of La Crosse virus, neonatal calf diarrhoea virus, Venezuelan equine encephalomyelitis virus, punta toro virus, murine leukemia virus, mouse mammary tumor virus, hepatitis B virus core protein and hepatitis B virus surface antigen or a fragment or derivative thereof, antigen of equine influenza virus or equine herpes virus, including equine influenza virus type A/Alaska 91 neuraminidase, equine influenza virus typeA/Miami 63 neuraminidase, equine influenza virus type A/Kentucky 81 neuraminidase equine herpes virus type 1 glycoprotein B, and equine herpes virus type 1 glycoprotein D, antigen of bovine respiratory syncytial virus or bovine parainfluenza virus, bovine respiratory syncytial virus attachment protein (BRSV G), bovine respiratory syncytial virus fusion protein (BRSV F), bovine respiratory syncytial virus nucleocapsid protein (BRSVN), bovine parainfluenza virus type 3 fusion protein, bovine parainfluenza virus type 3 hemagglutinin neuraminidase, bovine E viral diarrhoea virus glycoprotein 48 and glycoprotein 53, glycoprotein E of Dengue virus, glycoprotein ElE2 of human hepatitis C virus or a combination thereof. For example, the antigen binding polypeptide or polypeptide comprised within the antigen binding complex may comprise a VH2 that specifically binds to influenza virus neuraminidase, influenza virus hemagglutinin, human respiratory syncytial virus (RSV)-viral proteins, RSV F glycoprotein, RSV G glycoprotein, herpes simplex virus (HSV) viral proteins, herpes simplex virus glycoproteins gB, gC, gD, and gE, Chlamydia MOMP and PorB antigens, core protein, matrix protein or other protein of Dengue virus, measles virus hemagglutinin, herpes simplex virus type 2 glycoprotein gB, poliovirus 1 VP1, envelope glycoproteins of HIV 1, hepatitis B surface antigen, diptheria toxin, Streptococcus 24M epitope, gonococcal pilin, pseudorabies virus g50 (gpD), pseudorabies virus II (gpB), pseudorabies virus III (gpC), pseudorabies virus glycoprotein H, pseudorabies virus glycoprotein E, transmissible gastroenteritis glycoprotein 195, transmissible gastroenteritis matrix protein, swine rotavirus glycoprotein 38, swine parvovirus capsid protein, Serpulinahydodysenteriae protective antigen, bovine viral diarrhea glycoprotein 55, Newcastle disease virus hemagglutinin-neuraminidase, swine flu hemagglutinin, swine flu neuraminidase, foot and mouth disease virus, hog colera virus, swine influenza virus, African swine fever virus, Mycoplasma liyopneutiioniae, infectious bovine rhinotracheitis virus, infectious bovine rhinotracheitis virus glycoprotein E, glycoprotein G, infectious laryngotracheitis virus, infectious laryngotracheitis virus glycoprotein G or glycoprotein I, a glycoprotein of La Crosse virus, neonatal calf diarrhoea virus, Venezuelan equine encephalomyelitis virus, punta toro virus, murine leukemia virus, mouse mammary tumor virus, hepatitis B virus core protein and hepatitis B virus surface antigen or a fragment or derivative thereof, antigen of equine influenza virus or equine herpes virus, including equine influenza virus type A/Alaska 91 neuraminidase, equine influenza virus typeA/Miami 63 neuraminidase, equine influenza virus type A/Kentucky 81 neuraminidase equine herpes virus type 1 glycoprotein B, and equine herpes virus type 1 glycoprotein D, antigen of bovine respiratory syncytial virus or bovine parainfluenza virus, bovine respiratory syncytial virus attachment protein (BRSV G), bovine respiratory syncytial virus fusion protein (BRSV F), bovine respiratory syncytial virus nucleocapsid protein (BRSVN), bovine parainfluenza virus type 3 fusion protein, bovine parainfluenza virus type 3 hemagglutinin neuraminidase, bovine E viral diarrhoea virus glycoprotein 48 and glycoprotein 53, glycoprotein E of Dengue virus, glycoprotein ElE2 of human hepatitis C virus or a combination thereof. For example, the antigen binding polypeptide or polypeptide comprised within the antigen binding complex may comprise a VH3 that specifically binds to influenza virus neumminidase, influenza virus hemagglutinin, human respiratory syncytial virus (RSV)-viral proteins, RSV F glycoprotein, RSV G glycoprotein, herpes simplex virus (HSV) viral proteins, herpes simplex virus glycoproteins gB, gC, gD, and gE, Chlamydia MOMP and PorB antigens, core protein, matrix protein or other protein of Dengue virus, measles virus hemagglutinin, herpes simplex virus type 2 glycoprotein gB, poliovirus 1 VP1, envelope glycoproteins of HIV 1, hepatitis B surface antigen, diptheria toxin, Streptococcus 24M epitope, gonococcal pilin, pseudorabies virus g50 (gpD), pseudorabies virus II (gpB), pseudorabies virus III (gpC), pseudorabies virus glycoprotein H, pseudorabies virus glycoprotein E, transmissible gastroenteritis glycoprotein 195, transmissible gastroenteritis matrix protein, swine rotavirus glycoprotein 38, swine parvovirus capsid protein, Serpulinahydodysenteriae protective antigen, bovine viral diarrhea glycoprotein 55, Newcastle disease virus hemagglutinin-neumminidase, swine flu hemagglutinin, swine flu neuraminidase, foot and mouth disease virus, hog colera virus, swine influenza virus, African swine fever virus, Mycoplasma liyopneutiioniae, infectious bovine rhinotracheitis virus, infectious bovine rhinotracheitis virus glycoprotein E, glycoprotein G, infectious laryngotracheitis virus, infectious laryngotracheitis virus glycoprotein G or glycoprotein I, a glycoprotein of La Crosse virus, neonatal calf diarrhoea virus, Venezuelan equine encephalomyelitis virus, punta toro virus, murine leukemia virus, mouse mammary tumor virus, hepatitis B virus core protein and hepatitis B virus surface antigen or a fragment or derivative thereof, antigen of equine influenza virus or equine herpes virus, including equine influenza virus type A/Alaska 91 neuraminidase, equine influenza virus typeA/Miami 63 neuraminidase, equine influenza virus type A/Kentucky 81 neuraminidase equine herpes virus type 1 glycoprotein B, and equine herpes virus type 1 glycoprotein D, antigen of bovine respiratory syncytial virus or bovine parainfluenza virus, bovine respiratory syncytial virus attachment protein (BRSV G), bovine respiratory syncytial virus fusion protein (BRSV F), bovine respiratory syncytial virus nucleocapsid protein (BRSVN), bovine parainfluenza virus type 3 fusion protein, bovine parainfluenza virus type 3 hemagglutinin neuraminidase, bovine E viral diarrhoea virus glycoprotein 48 and glycoprotein 53, glycoprotein E of Dengue virus, glycoprotein ElE2 of human hepatitis C virus or a combination thereof. The antigen binding polypeptide described herein or the polypeptides of the antigen binding polypeptide complex described herein may comprise any combination of VL1, VL2, VL3, VL4, VH1, VH2, VH3, and/or VH4 that bind the targets described herein. In some aspects, the antigen binding polypeptide or antigen binding polypeptide complex (e.g., antibodies or antigen binding fragments thereof) specifically binds to a viral peptide, protein, polypeptide, or a fragment of influenza virus neuraminidase. In some aspects, the antigen binding polypeptide or antigen binding polypeptide complex (e.g., antibodies or antigen binding fragments thereof) specifically binds to a viral peptide, protein, polypeptide, or a fragment of influenza virus hemagglutinin. In some aspects, the antigen binding polypeptide or antigen binding polypeptide complex (e.g., antibodies or antigen binding fragments thereof) specifically binds to a viral peptide, protein, polypeptide, or a fragment of a human respiratory syncytial virus (RSV)-viral protein. In some aspects, the antigen binding polypeptide or antigen binding polypeptide complex (e.g., antibodies or antigen binding fragments thereof) specifically binds to a viral peptide, protein, polypeptide, or a fragment of RSV F glycoprotein. In some aspects, the antigen binding polypeptide or antigen binding polypeptide complex (e.g., antibodies or antigen binding fragments thereof) specifically binds to a viral peptide, protein, polypeptide, or a fragment of RSV G glycoprotein. In some aspects, the antigen binding polypeptide or antigen binding polypeptide complex (e.g., antibodies or antigen binding fragments thereof) specifically binds to a viral peptide, protein, polypeptide, or a fragment of a herpes simplex virus (HSV) viral protein. In some aspects, the antigen binding polypeptide or antigen binding polypeptide complex (e.g., antibodies or antigen binding fragments thereof) specifically binds to a viral peptide, protein, polypeptide, or a fragment of the herpes simplex virus glycoprotein gB, gC, gD, or gE. In some aspects, the antigen binding polypeptide or antigen binding polypeptide complex (e.g., antibodies or antigen binding fragments thereof) specifically binds to a viral peptide, protein, polypeptide, or a fragment of Chlamydia MOMP. In some aspects, the antigen binding polypeptide or antigen binding polypeptide complex (e.g., antibodies or antigen binding fragments thereof) specifically binds to a viral peptide, protein, polypeptide, or a fragment of a PorB antigen. In some aspects, the antigen binding polypeptide or antigen binding polypeptide complex (e.g., antibodies or antigen binding fragments thereof) specifically binds to a viral peptide, protein, polypeptide, or a fragment of core protein, matrix protein or other protein of Dengue virus. In some aspects, the antigen binding polypeptide or antigen binding polypeptide complex (e.g., antibodies or antigen binding fragments thereof) specifically binds to a viral peptide, protein, polypeptide, or a fragment of measles virus hemagglutinin. In some aspects, the antigen binding polypeptide or antigen binding polypeptide complex (e.g., antibodies or antigen binding fragments thereof) specifically binds to a viral peptide, protein, polypeptide, or a fragment of simplex virus type 2 glycoprotein gB. In some aspects, the antigen binding polypeptide or antigen binding polypeptide complex (e.g., antibodies or antigen binding fragments thereof) specifically binds to a viral peptide, protein, polypeptide, or a fragment of poliovirus 1 VP1. In some aspects, the antigen binding polypeptide or antigen binding polypeptide complex (e.g., antibodies or antigen binding fragments thereof) specifically binds to a viral peptide, protein, polypeptide, or a fragment of an envelope glycoprotein of HIV 1. In some aspects, the antigen binding polypeptide or antigen binding polypeptide complex (e.g., antibodies or antigen binding fragments thereof) specifically binds to a viral peptide, protein, polypeptide, or a fragment of hepatitis B surface antigen. In some aspects, the antigen binding polypeptide or antigen binding polypeptide complex (e.g., antibodies or antigen binding fragments thereof) specifically binds to a viral peptide, protein, polypeptide, or a fragment of diptheria toxin. In some aspects, the antigen binding polypeptide or antigen binding polypeptide complex (e.g., antibodies or antigen binding fragments thereof) specifically binds to a viral peptide, protein, polypeptide, or a fragment of Streptococcus 24M epitope. In some aspects, the antigen binding polypeptide or antigen binding polypeptide complex (e.g., antibodies or antigen binding fragments thereof) specifically binds to a viral peptide, protein, polypeptide, or a fragment of gonococcal pilin. In some aspects, the antigen binding polypeptide or antigen binding polypeptide complex (e.g., antibodies or antigen binding fragments thereof) specifically binds to a viral peptide, protein, polypeptide, or a fragment of pseudorabies virus g50 (gpD). In some aspects, the antigen binding polypeptide or antigen binding polypeptide complex (e.g., antibodies or antigen binding fragments thereof) specifically binds to a viral peptide, protein, polypeptide, or a fragment of pseudorabies virus II (gpB). In some aspects, the antigen binding polypeptide or antigen binding polypeptide complex (e.g., antibodies or antigen binding fragments thereof) specifically binds to a viral peptide, protein, polypeptide, or a fragment of pseudorabies virus III (gpC). In some aspects, the antigen binding polypeptide or antigen binding polypeptide complex (e.g., antibodies or antigen binding fragments thereof) specifically binds to a viral peptide, protein, polypeptide, or a fragment of pseudorabies virus glycoprotein H. In some aspects, the antigen binding polypeptide or antigen binding polypeptide complex (e.g., antibodies or antigen binding fragments thereof) specifically binds to a viral peptide, protein, polypeptide, or a fragment of pseudorabies virus glycoprotein E. In some aspects, the antigen binding polypeptide or antigen binding polypeptide complex (e.g., antibodies or antigen binding fragments thereof) specifically binds to a viral peptide, protein, polypeptide, or a fragment of transmissible gastroenteritis glycoprotein 195. In some aspects, the antigen binding polypeptide or antigen binding polypeptide complex (e.g., antibodies or antigen binding fragments thereof) specifically binds to a viral peptide, protein, polypeptide, or a fragment of transmissible gastroenteritis matrix protein. In some aspects, the antigen binding polypeptide or antigen binding polypeptide complex (e.g., antibodies or antigen binding fragments thereof) specifically binds to a viral peptide, protein, polypeptide, or a fragment of swine rotavirus glycoprotein 38. In some aspects, the antigen binding polypeptide or antigen binding polypeptide complex (e.g., antibodies or antigen binding fragments thereof) specifically binds to a viral peptide, protein, polypeptide, or a fragment of swine parvovirus capsid protein. In some aspects, the antigen binding polypeptide or antigen binding polypeptide complex (e.g., antibodies or antigen binding fragments thereof) specifically binds to a viral peptide, protein, polypeptide, or a fragment of Serpulinahydodysenteriae protective antigen. In some aspects, the antigen binding polypeptide or antigen binding polypeptide complex (e.g., antibodies or antigen binding fragments thereof) specifically binds to a viral peptide, protein, polypeptide, or a fragment of bovine viral diarrhea glycoprotein 55. In some aspects, the antigen binding polypeptide or antigen binding polypeptide complex (e.g., antibodies or antigen binding fragments thereof) specifically binds to a viral peptide, protein, polypeptide, or a fragment of Newcastle disease virus hemagglutinin-neuraminidase. In some aspects, the antigen binding polypeptide or antigen binding polypeptide complex (e.g., antibodies or antigen binding fragments thereof) specifically binds to a viral peptide, protein, polypeptide, or a fragment of swine flu hemagglutinin. In some aspects, the antigen binding polypeptide or antigen binding polypeptide complex (e.g., antibodies or antigen binding fragments thereof) specifically binds to a viral peptide, protein, polypeptide, or a fragment of swine flu neuraminidase. In some aspects, the antigen binding polypeptide or antigen binding polypeptide complex (e.g., antibodies or antigen binding fragments thereof) specifically binds to a viral peptide, protein, polypeptide, or a fragment of foot and mouth disease virus. In some aspects, the antigen binding polypeptide or antigen binding polypeptide complex (e.g., antibodies or antigen binding fragments thereof) specifically binds to a viral peptide, protein, polypeptide, or a fragment of hog colera virus. In some aspects, the antigen binding polypeptide or antigen binding polypeptide complex (e.g., antibodies or antigen binding fragments thereof) specifically binds to a viral peptide, protein, polypeptide, or a fragment of swine influenza virus. In some aspects, the antigen binding polypeptide or antigen binding polypeptide complex (e.g., antibodies or antigen binding fragments thereof) specifically binds to a viral peptide, protein, polypeptide, or a fragment of African swine fever virus. In some aspects, the antigen binding polypeptide or antigen binding polypeptide complex (e.g., antibodies or antigen binding fragments thereof) specifically binds to a viral peptide, protein, polypeptide, or a fragment of Mycoplasma liyopneutiioniae. In some aspects, the antigen binding polypeptide or antigen binding polypeptide complex (e.g., antibodies or antigen binding fragments thereof) specifically binds to a viral peptide, protein, polypeptide, or a fragment of. In some aspects, the antigen binding polypeptide or antigen binding polypeptide complex (e.g., antibodies or antigen binding fragments thereof) specifically binds to a viral peptide, protein, polypeptide, or a fragment of infectious bovine rhinotracheitis virus. In some aspects, the antigen binding polypeptide or antigen binding polypeptide complex (e.g., antibodies or antigen binding fragments thereof) specifically binds to a viral peptide, protein, polypeptide, or a fragment of infectious bovine rhinotracheitis virus glycoprotein E. In some aspects, the antigen binding polypeptide or antigen binding polypeptide complex (e.g., antibodies or antigen binding fragments thereof) specifically binds to a viral peptide, protein, polypeptide, or a fragment of glycoprotein G. In some aspects, the antigen binding polypeptide or antigen binding polypeptide complex (e.g., antibodies or antigen binding fragments thereof) specifically binds to a viral peptide, protein, polypeptide, or a fragment of infectious laryngotracheitis virus. In some aspects, the antigen binding polypeptide or antigen binding polypeptide complex (e.g., antibodies or antigen binding fragments thereof) specifically binds to a viral peptide, protein, polypeptide, or a fragment of an infectious laryngotracheitis virus glycoprotein G or glycoprotein I. In some aspects, the antigen binding polypeptide or antigen binding polypeptide complex (e.g., antibodies or antigen binding fragments thereof) specifically binds to a viral peptide, protein, polypeptide, or a fragment of a glycoprotein of La Crosse virus. In some aspects, the antigen binding polypeptide or antigen binding polypeptide complex (e.g., antibodies or antigen binding fragments thereof) specifically binds to a viral peptide, protein, polypeptide, or a fragment of neonatal calf diarrhoea virus. In some aspects, the antigen binding polypeptide or antigen binding polypeptide complex (e.g., antibodies or antigen binding fragments thereof) specifically binds to a viral peptide, protein, polypeptide, or a fragment of Venezuelan equine encephalomyelitis virus. In some aspects, the antigen binding polypeptide or antigen binding polypeptide complex (e.g., antibodies or antigen binding fragments thereof) specifically binds to a viral peptide, protein, polypeptide, or a fragment of punta toro virus. In some aspects, the antigen binding polypeptide or antigen binding polypeptide complex (e.g., antibodies or antigen binding fragments thereof) specifically binds to a viral peptide, protein, polypeptide, or a fragment of murine leukemia virus. In some aspects, the antigen binding polypeptide or antigen binding polypeptide complex (e.g., antibodies or antigen binding fragments thereof) specifically binds to a viral peptide, protein, polypeptide, or a fragment of mouse mammary tumor virus. In some aspects, the antigen binding polypeptide or antigen binding polypeptide complex (e.g., antibodies or antigen binding fragments thereof) specifically binds to a viral peptide, protein, polypeptide, or a fragment of hepatitis B virus core protein or hepatitis B virus surface antigen. In some aspects, the antigen binding polypeptide or antigen binding polypeptide complex (e.g., antibodies or antigen binding fragments thereof) specifically binds to a viral peptide, protein, polypeptide, or a fragment of equine influenza virus or equine herpes virus, such as equine influenza virus type A/Alaska 91 neuraminidase, equine influenza virus typeA/Miami 63 neuraminidase, equine influenza virus type A/Kentucky 81 neuraminidase equine herpes virus type 1 glycoprotein B, and equine herpes virus type 1 glycoprotein D. In some aspects, the antigen binding polypeptide or antigen binding polypeptide complex (e.g., antibodies or antigen binding fragments thereof) specifically binds to a viral peptide, protein, polypeptide, or a fragment of bovine respiratory syncytial virus or bovine parainfluenza virus. In some aspects, the antigen binding polypeptide or antigen binding polypeptide complex (e.g., antibodies or antigen binding fragments thereof) specifically binds to a viral peptide, protein, polypeptide, or a fragment of bovine respiratory syncytial virus attachment protein (BRSV G). In some aspects, the antigen binding polypeptide or antigen binding polypeptide complex (e.g., antibodies or antigen binding fragments thereof) specifically binds to a viral peptide, protein, polypeptide, or a fragment of bovine respiratory syncytial virus fusion protein (BRSV F). In some aspects, the antigen binding polypeptide or antigen binding polypeptide complex (e.g., antibodies or antigen binding fragments thereof) specifically binds to a viral peptide, protein, polypeptide, or a fragment of bovine respiratory syncytial virus nucleocapsid protein (BRSVN). In some aspects, the antigen binding polypeptide or antigen binding polypeptide complex (e.g., antibodies or antigen binding fragments thereof) specifically binds to a viral peptide, protein, polypeptide, or a fragment of bovine parainfluenza virus type 3 fusion protein. In some aspects, the antigen binding polypeptide or antigen binding polypeptide complex (e.g., antibodies or antigen binding fragments thereof) specifically binds to a viral peptide, protein, polypeptide, or a fragment of ovine parainfluenza virus type 3 hemagglutinin neuraminidase. In some aspects, the antigen binding polypeptide or antigen binding polypeptide complex (e.g., antibodies or antigen binding fragments thereof) specifically binds to a viral peptide, protein, polypeptide, or a fragment of bovine E viral diarrhoea virus glycoprotein 48 or glycoprotein 53. In some aspects, the antigen binding polypeptide or antigen binding polypeptide complex (e.g., antibodies or antigen binding fragments thereof) specifically binds to a viral peptide, protein, polypeptide, or a fragment of glycoprotein E of Dengue virus. In some aspects, the antigen binding polypeptide or antigen binding polypeptide complex (e.g., antibodies or antigen binding fragments thereof) specifically binds to a viral peptide, protein, polypeptide, or a fragment of glycoprotein ElE2 of human hepatitis C virus. Any of the antigen binding polypeptide structures and any of the antigen binding polypeptide complex structures described herein may be used to target one or more of the viral targets described herein.

[0137] Sequences from antibodies or antibody fragments to known spike protein epitopes on any virus or overexpressed receptors on a cancer cell can be inserted into the constructs disclosed herein to produce multispecific multivalent polypeptides and polypeptide complexes which bind to the epitopes on the virus or virus variants and to T cells which engage the virus or cancer cell. The Immune Epitope Database and Analysis Resource provides lists of epitope sequences associated with specific antigens and infectious organism. Known VL/VH pairs and CDRs are selected and chosen to insert into a plasmid or plasmids encoding a fully functional multispecific multivalent antibody. In a preferred embodiment, the source of a preferred initial antibody or monoclonal antibody is from a highly resistant subject that has developed broadly neutralizing antibodies resistant across evolving infectious viruses or cancer cells.

[0138] Viral antigens present in Influenza A virus include matrix protein 1, hemagglutinin, nucleoprotein RNA-directed RNA polymerase catalytic subunit, polymerase acidic protein, nuclear export protein, and polymerase basic protein 2. Epitope sequences are inclusive of, for example, those selected from GILGFVFTL (SEQ ID NO:422); PKYVKFQNTLKLAT (SEQ ID NO:423); SRYWAIRTR (SEQ ID NO:424); CTELKLSDY (SEQ ID NO:425); ELRSRYWAI (SEQ ID NO:426); ILRGSVAHK (SEQ ID NO:427); VSDGGPNLY (SEQ ID NO:428); FMYSEFHFI (SEQ ID NO:429); AIMDKNIIL (SEQ ID NO:430); NMLSTVLGV (SEQ ID NO:431); FLKDVMESM (SEQ ID NO:432); LPFEKSTVM (SEQ ID NO:433); and FVRQCFNPM (SEQ ID NO:434) etc. as disclosed in the above database.

[0139] Viral antigens present in Influenza B virus are selected from the group consisting of nucleoprotein, hemagglutinin; non-structural protein 1; neuraminidase and matrix protein 1. Epitopes from such proteins are selected from, for example, KLGEFYNQMM (SEQ ID NO:435); AVLLSNEGIINSEDE (SEQ ID NO:436); AVLLSNEGIINSEDEH (SEQ ID NO:437); AYDQSGRL (SEQ ID NO:438); AYDQSGRLV (SEQ ID NO:439); FPIMHDRTKI+OX(M4) (SEQ ID NO:440); ITKNLNSLSELEVKN (SEQ ID NO:441); ITKNLNSLSELEVKNLQ (SEQ ID NO:442); LAVLLSNEGIINSEDE (SEQ ID NO:443); LAVLLSNEGIINSEDEH (SEQ ID NO:444); and LPQSGRIVV (SEQ ID NO:445), as disclosed in the above database.

[0140] Antigens are selected from the group consisting of Influenza viruses and surface glycoproteins: H5N1 influenza: H1N1:H1N2:H3N2:HA (hemagglutinin surface glycoprotein); NA (neuraminidase surface glycoprotein); H5 and H7. Others include: Respiratory syncytial virus (RSV). Antigens associated with RSV include protein M2-1; matrix protein, fusion glycoprotein FO; nucleoprotein and small hydrophobic protein. Epitopes present on these proteins are inclusive of SYIGSINNI (SEQ ID NO:446); NAITNAKII (SEQ ID NO:447); KYKNAVTEL (SEQ ID NO:448); NSELLSLINDMPITNDQKKLMSNN (SEQ ID NO:449); NPKASLLSL (SEQ ID NO:450); VYNTVISYI (SEQ ID NO:451); TYMLTNSELL (SEQ ID NO:452): WAICKRIPNKKPG (SEQ ID NO:453); and KNRGIIKTFSN (SEQ ID NO:454) etc.;

[0141] Chlamydia. Antigens associated with Chlamydia trachomatis include major outer membrane porin, serovar D; chaperonin GroEL; uncharacterized protein (UniProt:Q9Z7F3) probably oxidoreductase CT_610 and inclusion membrane protein A. Epitope sequences include, for example, TLNPTI (SEQ ID NO:455); ATLVVNRIRGGF (SEQ ID NO:456); LNPTIA (SEQ ID NO:457); SANNDAEIGNLI (SEQ ID NO:458); PETISDPENRNKPSAE (SEQ ID NO:459); AEGQLG (SEQ ID NO:460); ARKLLLDNL (SEQ ID NO:461); ASFVNPIYL (SEQ ID NO:462); DVVDGMNFNRGY (SEQ ID NO:463); NMFTPYIGV (SEQ ID NO:464), and NLVGLIGVKGSSIAADQLPNVGIT (SEQ ID NO:465) etc.;

[0142] Adenovirdiae. Antigens associated with human adenovirus C include early EIA protein; hexon protein; DNA-binding protein; EIB 55 kDa protein and DNA polymerase. Epitope sequences include, for example, SGPSNTPPEI (SEQ ID NO:466), TDLGQNLLY (SEQ ID NO:467); LTDLGQNLLY (SEQ ID NO:468); FALSNAEDL (SEQ ID NO:469); DEPTLLYVLFEVFDV (SEQ ID NO:470); KYSPSNVKI (SEQ ID NO:471); MPNRNYIAF (SEQ ID NO:472); VDCYINLGARWSLDY (SEQ ID NO:473); VNIRNCCYI (SEQ ID NO:474); RNFQPMSRQVVDDTKYKDYQQVGILHQHNN (SEQ ID NO:475); LPKLTPFAL (SEQ ID NO:476); and FQRPTISSNSHAIFR (SEQ ID NO:477) etc;

[0143] Mastadenovirus. Human mastadenovirus C has various antigens associated with viral infection. These include early E1A protein; hexon protein; DNA binding protein; E1B 55 kDa protein; DNA polymerase and fiber protein. Epitope sequences are inclusive of, for example, SGPSNTPPEI (SEQ ID NO:478); TDLGQNLLY (SEQ ID NO:479); LTDLGQNLLY (SEQ ID NO:480); FALSNAEDL (SEQ ID NO:481); DEPTLLYVLFEVFDV (SEQ ID NO:482); KYSPSNVKI (SEQ ID NO:483); MPNRPNYIAF (SEQ ID NO:484); VDCYINLGARWSLDY (SEQ ID NO:485); LPKLTPFAL (SEQ ID NO:486); FQRPTISSNSHAIFR (SEQ ID NO:487) and GKYTTETFATNSYTPSYIAQE (SEQ ID NO:488) etc;

[0144] Aviadenovirus. Fowl adenovirus C has hexon protein as one of the antigens with epitopes DYDDYNIGTT (SEQ ID NO:489); KISGVFPNP (SEQ ID NO:490); PLAPKESMFN (SEQ ID NO:491); and ETLLIEDDVSGQGKELGVNLNPAGPITADEQGL (SEQ ID NO:492) etc;

[0145] Herpesviridae. Antigens depend upon particular organism with human herpesvirus 5 (human cytomegalovirus) and human herpesvirus 4 (Epstein Barr Virus) being predominant focus with antigens ranging from 65 kDa phosphoprotein; mRNA export factor ICP27 homolog; envelope glycoprotein B; latent membrane protein 2; Epstein-Barr nuclear antigen 3; M123; trans-activitor protein BZLF1; immediate early protein IE1; Epstein-Barr nuclear antigen 4; Epstein-Barr nuclear antigen 1; DNA polymerase processivity factor; ribonucleoside-diphosphate reductase large subunit-like protein; replication and transcription activator; and latent membrane protein 1 with epitope sequences selected from, for example, NLVPMVATV (SEQ ID NO:493); GLCTLVAML (SEQ ID NO:494); TPRVTGGGAM (SEQ ID NO:495); SSIEFARL (SEQ ID NO:496); CLGGLLTMV (SEQ ID NO:497); FLRGRAYGL (SEQ ID NO:498); TPHFMPTNL (SEQ ID NO:499); RAKFKQLL (SEQ ID NO:500); RPPIFIRRL (SEQ ID NO:501); VLEETSVML (SEQ ID NO:502); IVTDFSVIK (SEQ ID NO:503); IPSINVHHY (SEQ ID NO:504); QYDPVAALF (SEQ ID NO:505); HPVGEADYFEY (SEQ ID NO:506); VTEHDTLLY (SEQ ID NO:507); HGIRNASFI (SEQ ID NO:508); AVFDRKSDAK (SEQ ID NO:509); TPLHEQHGM (SEQ ID NO:510); YSEHPTFTSQY (SEQ ID NO:511); YVLDHLIVV (SEQ ID NO:512); YLLEMLWRL (SEQ ID NO:513); FLYALALLL (SEQ ID NO:514); QAKWRLQTL (SEQ ID NO:515); ELRRKMMYM (SEQ ID NO:516); and RPHERNGFTVL (SEQ ID NO:517) etc;

[0146] Herpes simplex virus 1 (human herpesvirus 1). Antigens include envelope glycoprotein B; ribonucleoside-diphosphate reductase large subunit; envelope glycoprotein D; tegument protein UL46; mRNA export factor; capsid vertex component 2 and ribonucleoside-diphosphate reductase small subunit. Epitope sequences include SSIEFARL (SEQ ID NO:518); QTFDRGRL (SEQ ID NO:519); SLKMADPNRFRGKDLP (SEQ ID NO:520); QPPSLPITVYYAVLERACTSVLLNAPSEAPQIVR (SEQ ID NO:521); RLNELLAYV (SEQ ID NO:522); RMLGDVMAV (SEQ ID NO:523); KYALADASLKMADPNRFRGKDLP (SEQ ID NO:524); SLPITVTTA (SEQ ID NO:525); DPEDSALL (SEQ ID NO:526); and DYATLGVGV (SEQ ID NO:527) etc;

[0147] Herpes simplex virus 2 (human herpesvirus 2). Antigens include Tegument protein VP22; envelope glycoprotein B; tegument protein VP16; Tegument protein UL47; tegument protein UL46; tegument protein VP16; envelope glycoprotein G; capsid vertex component 2; capsid scaffolding protein; envelope glycoprotein D; mRNA export factor; major viral transcription factor ICP4 homolog with antigen epitope sequences selected from, for example, RPRGEVRFL (SEQ ID NO:528); SSIEFARL (SEQ ID NO:529); EEVDMTPADALDDFD (SEQ ID NO:530); GLADTVVAC (SEQ ID NO:531); ASDSLNNEY (SEQ ID NO:532); DFEFEQMFTDAMG (SEQ ID NO:533); EVDMTPADAL (SEQ ID NO:534); PEEFEGAGDGEPPEDDDS (SEQ ID NO:535); FLWEDQTLL (SEQ ID NO:536); FLVDAIVRVA (SEQ ID NO:537); GPADAPPGSPAPPPPEHRGG (SEQ ID NO:538); GPHETITAL (SEQ ID NO:539); KYALADPSLKMADPNRFRGKNLP (SEQ ID NO:540); NNYGSTIEGLL (SEQ ID NO:541); PEEFEGAGDGEPPEDDDSAT (SEQ ID NO:542); PPLYATGRLSQAQLMPSPPM (SEQ ID NO:543); TQPELVPEDPED (SEQ ID NO:544); YTSTLLPPELSDTTN (SEQ ID NO:545): DPSLKMADPNRFRGKNLPVL (SEQ ID NO:546); PELVPEDPEDSALLEDPAGT (SEQ ID NO:547); HGPSLYRTF (SEQ ID NO:548); NKRVFCAAVGRLA (SEQ ID NO:549); PMRARPRGEVRFL (SEQ ID NO:550); VFCAAVGRL (SEQ ID NO:551); and LGNRLCGPATAAWAG (SEQ ID NO:552) and as further disclosed in the Immune Epitope database.

[0148] Herpes simplex virus 5 (human herpesvirus 5). Antigens include 65 kDa phosphoprotein; immediate early protein IE1; envelope glycoprotein H; other human herpesvirus 5 protein and envelope glycoprotein B. Epitope sequences include NLVPMVATV (SEQ ID NO:553); TMYGGISLL (SEQ ID NO:554); VLEETSVML (SEQ ID NO:555); LDPHAFHLLL (SEQ ID NO:556); RIFAELEGV (SEQ ID NO:557); RPHERNGFTVL (SEQ ID NO:558); VFPTKDVAL (SEQ ID NO:559); VLAELVKQI (SEQ ID NO:560); VLPHETRLL (SEQ ID NO:561); KRLDVCRAKMGYM (SEQ ID NO:562); GGGAMAGASTSAGRKRKS (SEQ ID NO:563); AALFFFDID (SEQ ID NO:564); AGILARNLVPMVATV (SEQ ID NO:565); ALFFFDIDLL (SEQ ID NO:566); ANETIYNTTLKYGDV (SEQ ID NO:567); ARAKKDELRRKMMYM (SEQ ID NO:568); ARNLVPMVATVQGQN (SEQ ID NO:569); ASTAAPPYTNEQAYQMLLAL (SEQ ID NO:570); AVGGAVASV (SEQ ID NO:571); DEEEAIVAYT (SEQ ID NO:572); DEEEAIVAYTL (SEQ ID NO:573); DPVAALFFF (SEQ ID NO:574); EEAIVAYTL (SEQ ID NO:575); EECQLPSLKIFIAGNSAY (SEQ ID NO:576) or EEEAIVAYTL (SEQ ID NO:577) and others disclosed in public databases such as the Immune Epitope database;

[0149] Other antigens include Herpes simplex virus 6; Leviviridae; Levivirus; Enterobacteria phase MS2; Allolevirus; Poxviridae; Chordopoxvirinae (cowpox virus or vaccinia virus); antigens include CPXV202 protein; intermediate transcription factor 3 small subunit; putative nuclease G5; interferon antagonist C7; protein A47; major core protein 4b; DNA directed RNA polymerase 147 kDa polypeptide; mRNA capping enzyme regulatory subunit; envelope protein H3; protein B6; telomere binding protein I1; protein K3; poxin; protein A19; assembly protein G7; protein F12; protein A46; protein A6; DNA polymerase; profiling; RNA binding protein E3; and serine protease inhibitor 1. The antigens have epitope sequences selected from TSYKFESV (SEQ ID NO:578); ITYRFYLI (SEQ ID NO:579); ILDDNLYKV (SEQ ID NO:580); KVDDTFYYV (SEQ ID NO:581); AAFEFINSL (SEQ ID NO:582); KSYNYMLL (SEQ ID NO:583); MPAYIRNTL (SEQ ID NO:584); RVYEALYYV (SEQ ID NO:585); IGMFNLTFI (SEQ ID NO:586); SLSAYIIRV (SEQ ID NO:587); LMYDIINSV (SEQ ID NO:588); RLYDYFTRV (SEQ ID NO:589); YSLPNAGDVI (SEQ ID NO:590); YSQVNKRYI (SEQ ID NO:591); VSLDYINTM (SEQ ID NO:592); TLPEVISTI (SEQ ID NO:593); FLTSVINRV (SEQ ID NO:594); GFFDFVNFV (SEQ ID NO:595); VLYDEFVTI (SEQ ID NO:596); FPYEGGKVF (SEQ ID NO:597); LMDENTYAM (SEQ ID NO:598); NLFDIPLLTV (SEQ ID NO:599); VGPSNSPTF (SEQ ID NO:600); YAPVSPIVI (SEQ ID NO:601) and HVDGKILFV (SEQ ID NO:602) etc;

[0150] Parapoxvirus (orf virus). Antigens include uncharacterized protein; ORF011 putative EEV envelope phospholipase; ORF052 putative IMV membrane protein; ORF110 EEV glycoprotein; ORF094 putative phosphorylated IMV membrane protein; ORF056RNA polymerase subunit RP0147; ORF101 RNA polymerase subunit RP0132 having epitope sequences AAFEFRDL (SEQ ID NO:603); AIIKYTDL (SEQ ID NO:604); AIYAFRLT (SEQ ID NO:605); AIYGFGVTF (SEQ ID NO:606); ANVDFMEYV (SEQ ID NO:607); and EQFSFSNV (SEQ ID NO:608). Other antigens and their associated antibodies and antibody fragments which bind to epitopes include Avipoxvirus; Capripoxvirus; Leporiipoxvirus; Suipoxvirus; Molluscipoxvirus; Entomopoxvirinae; Papovaviridae; Polyomavirus; Papillomavirus; Paramyxoviridae; Paramyxovirus; Parainfluenza virus 1; Morbillivirus; Measles virus; Rubulavirus; Mumps virus; Pneumonovirinae; Pneumovirus; Metapneumovirus; Avian pneumovirus; Human metapneumovirus; Picornaviridae, and Enterovirus (enterovirus A, coxsackievirus A). Antigen includes genome polyprotein having epitopes selected from TYTFGEHKQEKDLEY (SEQ ID NO:609); TEDSHPPYKQTQPGA (SEQ ID NO:610); PESRESLAWQTATNP (SEQ ID NO:611); FGEHKQEKDL (SEQ ID NO:612); AGGTGTEDSHPPYKQ (SEQ ID NO:613); FGEHKQEKDL (SEQ ID NO:614); AGGTGTEDSHPPYKQ (SEQ ID NO:615); FGEHKQEKDLEYGAC (SEQ ID NO:616); HYRAHARDGVFDYYT (SEQ ID NO:617); KQEDK (SEQ ID NO:618); GDPIADMIDQTVNNQ (SEQ ID NO:619); YPTFGEHLQANDLDY (SEQ ID NO:620); LEGTTNPNT (SEQ ID NO:621); VSSHRLDDTGEVPALQ (SEQ ID NO:622); RIYMRMKHVR (SEQ ID NO:623); TSKSKYPLVV (SEQ ID NO:624); and DGYPTFGEHKQEKDL (SEQ ID NO:625) etc;

[0151] Rhinovirus and Hepatovirus. Human hepatitis A virus (hepatovirus A) with genome polyproteins as an antigen with epitopes YMYAVS GAL (SEQ ID NO:626); FWRGDLVFDFQV (SEQ ID NO:627); MNMSKQGIFQTVGSGLDHILSLA (SEQ ID NO:628); TVSTEQNVPDPQVGI (SEQ ID NO:629); ASICQMFCFWRGDLVFDFQV (SEQ ID NO:630); DHMSIYKFMGRSHFLCTFTF (SEQ ID NO:631); FPELKPGESTHTSDHMSIYK (SEQ ID NO:632) and as additionally disclosed in the IED. Others are inclusive of Cardiovirus; Andapthovirus, Reoviridae, Orthoreovirus; Orbivirus; Rotavirus; Cypovirus; Fijivirus, phytoreovirus; oryzavirus; retroviridae; mammalian type B retrovirus; mammalian type C retroviruses; avian type C retroviruses; type D retrovirus group; BLV-HTLV retroviruses; Lentivirus; Human immunodeficiency virus 1; Human immunodeficiency virus 2; HTLV-I and II viruses; Herpes simplex virus; Epstein Barr virus; Cytomegalovirus; Hepatitis virus (HCV, HAV, HBV, HDV, HEV); Toxoplasma gondii virus, Treponema pallidium virus; Human T-lymphotrophic virus; Encephalitis virus; West Nile virus; Dengue virus; Varicella Zoster virus; Rubeola, mumps, rubella, spumavirus, flaviviridae, hepatitis C virus; hepadnaviridae, hepatitis B virus; togaviridae, alphavirus sindbis virus; rubivirus; rubella virus, rhabdovridae, vesiculovirus; lyssavirus, ephemerovirus, cytohabdovirus, necleorhabdovirus, arenaviridae, arenavirus, lymphocytic choriomenigitis virus; Ippy virus; Lassa virus; and Torovirus etc.

[0152] Thus, the recited multispecific and multivalent antibody constructs have embedded sequences that target and bind to epitopes on viral peptides, proteins, polypeptides or glycosylated versions thereof in a subject in need of treatment thereof, wherein said viral peptides, proteins, polypeptides or glycosylated versions thereof are selected from the group consisting of influenza virus neuraminidase, influenza virus hemagglutinin, human respiratory syncytial virus (RSV)-viral proteins, RSV F glycoprotein, RSV G glycoprotein, herpes simplex virus (HSV) viral proteins, herpes simplex virus glycoproteins gB, gC, gD and gE, Chlamydia MOMP and PorB antigens, core protein, matrix protein or other protein of Dengue virus, measles virus hemagglutinin, herpes simplex virus type 2 glycoprotein gB, poliovirus 1 VP1, envelope glycoproteins of HIV 1, hepatitis B surface antigen, diphtheria toxin, Streptococcus 24 M epitope, gonococcal pilin, pseudorabies virus g50 (gpD), pseudorabies virus II (gpB), pseudorabies virus III (gpC), pseudorabides virus glycoprotein H, pseudorabies virus glycoprotein E, transmissible gastroenteritis glycoprotein 195, transmissible gastroenteritis matrix protein, swine rotavirus glycoprotein 38, swine parvovirus capside protein, serpulinahydodysenteriae protective antigen, govine viral diarrhea glycoprotein 55, Newcastle disease virus hemagglutinin-neuroaminidase, swine flu hemagglutinin, swine flue neuraminidase, foot and mouth disease virus, hog colera virus, swine influenza virus, African swine fever virus, Mycoplasma liyopneutiinniae, infections bovine rhinotracheitis virus, infection bovine rhinotracheitis virus glycoprotein e, glycoprotein G, infectiouls laryngotracheitis virus, infectious laryngotracheitis virus glycoprotein G or glycoprotein I, a glycoprotein of Las Cross virus, neonatal calf diarrhea virus, Venezuelan equine encephalomyelitis virus, punta toro virus, murine leukemia virus, mouse mammary tumor virus, hepatitis B virus core protein and hepatitis B virus surface antigen or a fragment or derivative thereof, antigen of equine influenza virus or equine herpes virus, including equine influenza virus type A/Alaska 91 neuraminidase, equine influenza virus typeA/Miami 63 neuraminidase, equine influenza virus type A/Kentucky 81 neuraminidase equine herpes virus type 1 glycoprotein B, and equine herpes virus type 1 glycoprotein D, antigen of bovine respiratory syncytial virus or bovine parainfluenza virus, bovine respiratory syncytial virus attachment protein (BRSV G), bovine respiratory syncytial virus fusion protein (BRSV F), bovine respiratory syncytial virus nucleocapside protein (BRSVN), bovine parainfluenza virus type 3 fusion protein, bovine parainfluenza virus type 3 hemagglutinin neuraminidase, bovine viral diarrhea virus glycoprotein 48 and glycoprotein 53, glycoprotein E of Dengue virus, and glycoprotein ElE2 of human hepatitis C virus. All the antigen binding polypeptide structures described herein and all the antigen binding polypeptide complex structures described herein can specifically bind to one or more of the viral antigen targets described herein, namely one or more of (such as two or more, three or more or four of): influenza virus neuraminidase, influenza virus hemagglutinin, human respiratory syncytial virus (RSV)-viral proteins, RSV F glycoprotein, RSV G glycoprotein, herpes simplex virus (HSV) viral proteins, herpes simplex virus glycoproteins gB, gC, gD and gE, Chlamydia MOMP and PorB antigens, core protein, matrix protein or other protein of Dengue virus, measles virus hemagglutinin, herpes simplex virus type 2 glycoprotein gB, poliovirus 1 VP1, envelope glycoproteins of HIV 1, hepatitis B surface antigen, diphtheria toxin, Streptococcus 24 M epitope, gonococcal pilin, pseudorabies virus g50 (gpD), pseudorabies virus II (gpB), pseudorabies virus III (gpC), pseudorabides virus glycoprotein H, pseudorabies virus glycoprotein E, transmissible gastroenteritis glycoprotein 195, transmissible gastroenteritis matrix protein, swin rotavirus glycoprotein 38, swine parvovirus capside protein, serpulinahydodysenteriae protective antigen, govine viral diarrhea glycoprotein 55, Newcastle disease virus hemagglutinin-neuroaminidase, swine flu hemagglutinin, swine flue neuraminidase, foot and mouth disease virus, hog colera virus, swine influenza virus, African swine fever virus, Mycoplasma liyopneutiinniae, infections bovine rhinotracheitis virus, infection bovine rhinotracheitis virus glycoprotein e, glycoprotein G, infectiouls laryngotracheitis virus, infectious laryngotracheitis virus glycoprotein G or glycoprotein I, a glycoprotein of Las Cross virus, neonatal calf diarrhea virus, Venezuelan equine encephalomyelitis virus, punta toro virus, murine leukemia virus, mouse mammary tumor virus, hepatitis B virus core protein and hepatitis B virus surface antigen or a fragment or derivative thereof, antigen of equine influenza virus or equine herpes virus, including equine influenza virus type A/Alaska 91 neuraminidase, equine influenza virus typeA/Miami 63 neuraminidase, equine influenza virus type A/Kentucky 81 neuraminidase equine herpes virus type 1 glycoprotein B, and equine herpes virus type 1 glycoprotein D, antigen of bovine respiratory syncytial virus or bovine parainfluenza virus, bovine respiratory syncytial virus attachment protein (BRSV G), bovine respiratory syncytial virus fusion protein (BRSV F), bovine respiratory syncytial virus nucleocapside protein (BRSVN), bovine parainfluenza virus type 3 fusion protein, bovine parainfluenza virus type 3 hemagglutinin neuraminidase, bovine viral diarrhea virus glycoprotein 48 and glycoprotein 53, glycoprotein E of Dengue virus, and glycoprotein ElE2 of human hepatitis C virus. In some aspects, the antigen binding polypeptide described herein or the antigen binding polypeptide complex described herein comprises a VL1 that specifically binds to influenza virus neuraminidase, influenza virus hemagglutinin, human respiratory syncytial virus (RSV)-viral proteins, RSV F glycoprotein, RSV G glycoprotein, herpes simplex virus (HSV) viral proteins, herpes simplex virus glycoproteins gB, gC, gD and gE, Chlamydia MOMP and PorB antigens, core protein, matrix protein or other protein of Dengue virus, measles virus hemagglutinin, herpes simplex virus type 2 glycoprotein gB, poliovirus 1 VP1, envelope glycoproteins of HIV 1, hepatitis B surface antigen, diphtheria toxin, Streptococcus 24 M epitope, gonococcal pilin, pseudorabies virus g50 (gpD), pseudorabies virus II (gpB), pseudorabies virus III (gpC), pseudorabides virus glycoprotein H, pseudorabies virus glycoprotein E, transmissible gastroenteritis glycoprotein 195, transmissible gastroenteritis matrix protein, swin rotavirus glycoprotein 38, swine parvovirus capside protein, serpulinahydodysenteriae protective antigen, govine viral diarrhea glycoprotein 55, Newcastle disease virus hemagglutinin-neuroaminidase, swine flu hemagglutinin, swine flue neuraminidase, foot and mouth disease virus, hog colera virus, swine influenza virus, African swine fever virus, Mycoplasma liyopneutiinniae, infections bovine rhinotracheitis virus, infection bovine rhinotracheitis virus glycoprotein e, glycoprotein G, infectiouls laryngotracheitis virus, infectious laryngotracheitis virus glycoprotein G or glycoprotein I, a glycoprotein of Las Cross virus, neonatal calf diarrhea virus, Venezuelan equine encephalomyelitis virus, punta toro virus, murine leukemia virus, mouse mammary tumor virus, hepatitis B virus core protein and hepatitis B virus surface antigen or a fragment or derivative thereof, antigen of equine influenza virus or equine herpes virus, including equine influenza virus type A/Alaska 91 neuraminidase, equine influenza virus typeA/Miami 63 neuraminidase, equine influenza virus type A/Kentucky 81 neuraminidase equine herpes virus type 1 glycoprotein B, and equine herpes virus type 1 glycoprotein D, antigen of bovine respiratory syncytial virus or bovine parainfluenza virus, bovine respiratory syncytial virus attachment protein (BRSV G), bovine respiratory syncytial virus fusion protein (BRSV F), bovine respiratory syncytial virus nucleocapside protein (BRSVN), bovine parainfluenza virus type 3 fusion protein, bovine parainfluenza virus type 3 hemagglutinin neuraminidase, bovine viral diarrhea virus glycoprotein 48 and glycoprotein 53, glycoprotein E of Dengue virus, or glycoprotein ElE2 of human hepatitis C virus. In some aspects, the antigen binding polypeptide described herein or the antigen binding polypeptide complex described herein comprises a VL2 that specifically binds to influenza virus neuraminidase, influenza virus hemagglutinin, human respiratory syncytial virus (RSV)-viral proteins, RSV F glycoprotein, RSV G glycoprotein, herpes simplex virus (HSV) viral proteins, herpes simplex virus glycoproteins gB, gC, gD and gE, Chlamydia MOMP and PorB antigens, core protein, matrix protein or other protein of Dengue virus, measles virus hemagglutinin, herpes simplex virus type 2 glycoprotein gB, poliovirus 1 VP1, envelope glycoproteins of HIV 1, hepatitis B surface antigen, diphtheria toxin, Streptococcus 24 M epitope, gonococcal pilin, pseudorabies virus g50 (gpD), pseudorabies virus II (gpB), pseudorabies virus III (gpC), pseudorabides virus glycoprotein H, pseudorabies virus glycoprotein E, transmissible gastroenteritis glycoprotein 195, transmissible gastroenteritis matrix protein, swin rotavirus glycoprotein 38, swine parvovirus capside protein, serpulinahydodysenteriae protective antigen, govine viral diarrhea glycoprotein 55, Newcastle disease virus hemagglutinin-neuroaminidase, swine flu hemagglutinin, swine flue neuraminidase, foot and mouth disease virus, hog colera virus, swine influenza virus, African swine fever virus, Mycoplasma liyopneutiinniae, infections bovine rhinotracheitis virus, infection bovine rhinotracheitis virus glycoprotein e, glycoprotein G, infectiouls laryngotracheitis virus, infectious laryngotracheitis virus glycoprotein G or glycoprotein I, a glycoprotein of Las Cross virus, neonatal calf diarrhea virus, Venezuelan equine encephalomyelitis virus, punta toro virus, murine leukemia virus, mouse mammary tumor virus, hepatitis B virus core protein and hepatitis B virus surface antigen or a fragment or derivative thereof, antigen of equine influenza virus or equine herpes virus, including equine influenza virus type A/Alaska 91 neuraminidase, equine influenza virus typeA/Miami 63 neuraminidase, equine influenza virus type A/Kentucky 81 neuraminidase equine herpes virus type 1 glycoprotein B, and equine herpes virus type 1 glycoprotein D, antigen of bovine respiratory syncytial virus or bovine parainfluenza virus, bovine respiratory syncytial virus attachment protein (BRSV G), bovine respiratory syncytial virus fusion protein (BRSV F), bovine respiratory syncytial virus nucleocapside protein (BRSVN), bovine parainfluenza virus type 3 fusion protein, bovine parainfluenza virus type 3 hemagglutinin neuraminidase, bovine viral diarrhea virus glycoprotein 48 and glycoprotein 53, glycoprotein E of Dengue virus, or glycoprotein ElE2 of human hepatitis C virus. In some aspects, the antigen binding polypeptide described herein or the antigen binding polypeptide complex described herein comprises a VH1 that specifically binds to influenza virus neuraminidase, influenza virus hemagglutinin, human respiratory syncytial virus (RSV)-viral proteins, RSV F glycoprotein, RSV G glycoprotein, herpes simplex virus (HSV) viral proteins, herpes simplex virus glycoproteins gB, gC, gD and gE, Chlamydia MOMP and PorB antigens, core protein, matrix protein or other protein of Dengue virus, measles virus hemagglutinin, herpes simplex virus type 2 glycoprotein gB, poliovirus 1 VP1, envelope glycoproteins of HIV 1, hepatitis B surface antigen, diphtheria toxin, Streptococcus 24 M epitope, gonococcal pilin, pseudorabies virus g50 (gpD), pseudorabies virus II (gpB), pseudorabies virus III (gpC), pseudorabides virus glycoprotein H, pseudorabies virus glycoprotein E, transmissible gastroenteritis glycoprotein 195, transmissible gastroenteritis matrix protein, swin rotavirus glycoprotein 38, swine parvovirus capside protein, serpulinahydodysenteriae protective antigen, govine viral diarrhea glycoprotein 55, Newcastle disease virus hemagglutinin-neuroaminidase, swine flu hemagglutinin, swine flue neuraminidase, foot and mouth disease virus, hog colera virus, swine influenza virus, African swine fever virus, Mycoplasma liyopneutiinniae, infections bovine rhinotracheitis virus, infection bovine rhinotracheitis virus glycoprotein e, glycoprotein G, infectiouls laryngotracheitis virus, infectious laryngotracheitis virus glycoprotein G or glycoprotein I, a glycoprotein of Las Cross virus, neonatal calf diarrhea virus, Venezuelan equine encephalomyelitis virus, punta toro virus, murine leukemia virus, mouse mammary tumor virus, hepatitis B virus core protein and hepatitis B virus surface antigen or a fragment or derivative thereof, antigen of equine influenza virus or equine herpes virus, including equine influenza virus type A/Alaska 91 neuraminidase, equine influenza virus typeA/Miami 63 neuraminidase, equine influenza virus type A/Kentucky 81 neuraminidase equine herpes virus type 1 glycoprotein B, and equine herpes virus type 1 glycoprotein D, antigen of bovine respiratory syncytial virus or bovine parainfluenza virus, bovine respiratory syncytial virus attachment protein (BRSV G), bovine respiratory syncytial virus fusion protein (BRSV F), bovine respiratory syncytial virus nucleocapside protein (BRSVN), bovine parainfluenza virus type 3 fusion protein, bovine parainfluenza virus type 3 hemagglutinin neuraminidase, bovine viral diarrhea virus glycoprotein 48 and glycoprotein 53, glycoprotein E of Dengue virus, or glycoprotein ElE2 of human hepatitis C virus. In some aspects, the antigen binding polypeptide described herein or the antigen binding polypeptide complex described herein comprises a VH2 that specifically binds to influenza virus neuraminidase, influenza virus hemagglutinin, human respiratory syncytial virus (RSV)-viral proteins, RSV F glycoprotein, RSV G glycoprotein, herpes simplex virus (HSV) viral proteins, herpes simplex virus glycoproteins gB, gC, gD and gE, Chlamydia MOMP and PorB antigens, core protein, matrix protein or other protein of Dengue virus, measles virus hemagglutinin, herpes simplex virus type 2 glycoprotein gB, poliovirus 1 VP1, envelope glycoproteins of HIV 1, hepatitis B surface antigen, diphtheria toxin, Streptococcus 24 M epitope, gonococcal pilin, pseudorabies virus g50 (gpD), pseudorabies virus II (gpB), pseudorabies virus III (gpC), pseudorabides virus glycoprotein H, pseudorabies virus glycoprotein E, transmissible gastroenteritis glycoprotein 195, transmissible gastroenteritis matrix protein, swin rotavirus glycoprotein 38, swine parvovirus capside protein, serpulinahydodysenteriae protective antigen, govine viral diarrhea glycoprotein 55, Newcastle disease virus hemagglutinin-neuroaminidase, swine flu hemagglutinin, swine flue neuraminidase, foot and mouth disease virus, hog colera virus, swine influenza virus, African swine fever virus, Mycoplasma liyopneutiinniae, infections bovine rhinotracheitis virus, infection bovine rhinotracheitis virus glycoprotein e, glycoprotein G, infectiouls laryngotracheitis virus, infectious laryngotracheitis virus glycoprotein G or glycoprotein I, a glycoprotein of Las Cross virus, neonatal calf diarrhea virus, Venezuelan equine encephalomyelitis virus, punta toro virus, murine leukemia virus, mouse mammary tumor virus, hepatitis B virus core protein and hepatitis B virus surface antigen or a fragment or derivative thereof, antigen of equine influenza virus or equine herpes virus, including equine influenza virus type A/Alaska 91 neuraminidase, equine influenza virus typeA/Miami 63 neuraminidase, equine influenza virus type A/Kentucky 81 neuraminidase equine herpes virus type 1 glycoprotein B, and equine herpes virus type 1 glycoprotein D, antigen of bovine respiratory syncytial virus or bovine parainfluenza virus, bovine respiratory syncytial virus attachment protein (BRSV G), bovine respiratory syncytial virus fusion protein (BRSV F), bovine respiratory syncytial virus nucleocapside protein (BRSVN), bovine parainfluenza virus type 3 fusion protein, bovine parainfluenza virus type 3 hemagglutinin neuraminidase, bovine viral diarrhea virus glycoprotein 48 and glycoprotein 53, glycoprotein E of Dengue virus, or glycoprotein ElE2 of human hepatitis C virus. The antigen binding polypeptide and antigen binding polypeptide complex described herein may comprise any combination of VH1, VH2, VL1 and VL2 that bind the targets described herein. For example, said viral peptides, proteins, polypeptides or glycosylated versions thereof are selected from the group consisting of: influenza virus neuraminidase, influenza virus hemagglutinin, herpes simplex virus (HSV) viral proteins, core protein, matrix protein or other protein of Dengue virus, and swine influenza viral proteins. All the antigen binding polypeptide structures described herein and all the antigen binding polypeptide complex structures described herein can specifically bind to one or more of the viral antigen targets described herein, namely one or more of (such as two or more, three or more or four of): influenza virus neuraminidase, influenza virus hemagglutinin, herpes simplex virus (HSV) viral proteins, core protein, matrix protein or other protein of Dengue virus, and swine influenza viral proteins. In some aspects, the antigen binding polypeptide and the antigen binding polypeptide complex can specifically bind to influenza virus neuraminidase. In some aspects, the antigen binding polypeptide or the antigen binding polypeptide complex comprises a VL1 that specifically binds to influenza virus neuraminidase. In some aspects, the antigen binding polypeptide or the antigen binding polypeptide complex comprises a VL2 that specifically binds to influenza virus neuraminidase. In some aspects, the antigen binding polypeptide or the antigen binding polypeptide complex comprises a VH1 that specifically binds to influenza virus neuraminidase. In some aspects, the antigen binding polypeptide or the antigen binding polypeptide complex comprises a VH2 that specifically binds to influenza virus neuraminidase. In some aspects, the antigen binding polypeptide and the antigen binding polypeptide complex can specifically bind to influenza virus hemagglutinin. In some aspects, the antigen binding polypeptide or the antigen binding polypeptide complex comprises a VL1 that specifically binds to influenza virus hemagglutinin. In some aspects, the antigen binding polypeptide or the antigen binding polypeptide complex comprises a VL2 that specifically binds to influenza virus hemagglutinin. In some aspects, the antigen binding polypeptide or the antigen binding polypeptide complex comprises a VH1 that specifically binds to influenza virus hemagglutinin. In some aspects, the antigen binding polypeptide or the antigen binding polypeptide complex comprises a VH2 that specifically binds to influenza virus hemagglutinin. In some aspects, the antigen binding polypeptide and the antigen binding polypeptide complex can specifically bind to herpes simplex virus (HSV) viral proteins. In some aspects, the antigen binding polypeptide or the antigen binding polypeptide complex comprises a VL1 that specifically binds to herpes simplex virus (HSV) viral proteins. In some aspects, the antigen binding polypeptide or the antigen binding polypeptide complex comprises a VL2 that specifically binds to herpes simplex virus (HSV) viral proteins. In some aspects, the antigen binding polypeptide or the antigen binding polypeptide complex comprises a VH1 that specifically binds to herpes simplex virus (HSV) viral proteins. In some aspects, the antigen binding polypeptide or the antigen binding polypeptide complex comprises a VH2 that specifically binds to herpes simplex virus (HSV) viral proteins. In some aspects, the antigen binding polypeptide and the antigen binding polypeptide complex can specifically bind to gue virus. In some aspects, the antigen binding polypeptide or the antigen binding polypeptide complex comprises a VL1 that specifically binds to Dengue virus. In some aspects, the antigen binding polypeptide or the antigen binding polypeptide complex comprises a VL2 that specifically binds to Dengue virus. In some aspects, the antigen binding polypeptide or the antigen binding polypeptide complex comprises a VH1 that specifically binds to Dengue virus. In some aspects, the antigen binding polypeptide or the antigen binding polypeptide complex comprises a VH2 that specifically binds to Dengue virus. In some aspects, the antigen binding polypeptide and the antigen binding polypeptide complex can specifically bind to swine influenza virus. In some aspects, the antigen binding polypeptide described herein or the antigen binding polypeptide complex described herein comprises a VL1 that specifically binds to swine influenza virus. In some aspects, the antigen binding polypeptide described herein or the antigen binding polypeptide complex described herein comprises a VL2 that specifically binds to swine influenza virus. In some aspects, the antigen binding polypeptide described herein or the antigen binding polypeptide complex described herein comprises a VH1 that specifically binds to swine influenza virus. In some aspects, the antigen binding polypeptide described herein or the antigen binding polypeptide complex described herein comprises a VH2 that specifically binds to swine influenza virus.

[0153] In other aspects, the invention is directed to an antigen binding polypeptide or antigen binding polypeptide complex that specifically binds to A2AR, APRIL, ATPDase, BAFF, BAFFR, BCMA, BlyS, BTK, BTLA, B7DC, B7H1, B7H2, B7H3, B7H4, B7H5, B7H6, B7H7, B7RP1, B7-4, C3, C5, CCL2, CCL3, CCL4, CCL5, CCL7, CCL8, CCL11, CCL15, CCL17, CCL19, CCL20, CCL21, CCL25 CCR3, CCR4, CD3, CD16A, CD19, CD20, CD24, CD27, CD28, CD30, CD38, CD39, CD40, CD40L, CD47, CD52, CD70, CD80, CD86, CD123, CD133, CD137, CD137L, CD160, CD272, CEACAM5, CLEC9, CLEC91, CRTH2, CSF-1, CSF-2, CSF-3, CXCL1, CXCL2, CXCL4, CXCL12, CXCL13, CXCR3, cMet, CTLA4, DLL3, DLL4, DNGR-1, E-cadherin, EGFR, ENTPD1, EpCAM, FCER1, FCER1A, FCER2, FGFR, FLAP, FOLH1, Gi24, GITR, GITRL, GPR5, GP100, GPRC5D, HER2, HER3, ICOSL, ICOS, HHLA2, HMGB1, HVEM, IDO, IFNa, IgE, IGF1R, IL2Rbeta, IL1, ILIA, IL1B, IL1F10, IL2, IL4, IL4Ra, IL5, IL5R, IL6, IL7, IL7Ra, IL8, IL9, IL9R, IL10, rhIL1O, IL12, IL13, IL13Ra1, IL13Ra2, IL15, IL17, IL17Rb, IL18, IL22, IL23, IL25, IL7, IL33, IL35, ITGB4, ITK, KIR, LAG3, LAMP1, leptin, LPFS2, MHC class II, MUC-1, MUC-16, NCR3LG1, NKG2D, NKp46, NTPDase-1, OX40, OX40L, PD-1, PD-L1, PD-L2, PROM1, S152, SIRPalpha, SISP1, SLC, SPG64, ST2, STEAP1, STEAP2, Syk kinase, STEAP1, TROP2, TACI, TDO, TGFbeta, T14, TIGIT, TIM3, TLR, TLR2, TLR4, TLR5, TLR9, TMEF1, TNFa, TNFRSF7, Tp55, TREM1, TSLP, TSLPR, TWEAK, VEGF, VISTA, Vstm3, or WUCAM, or a combination thereof. In some aspects, the antigen binding polypeptide or antigen binding polypeptide complex specifically binds at least one epitope on at least one antigen selected from the group consisting of A2AR, APRIL, ATPDase, BAFF, BAFFR, BCMA, BlyS, BTK, BTLA, B7DC, B7H1, B7H2, B7H3, B7H4, B7H5, B7H6, B7H7, B7RP1, B7-4, C3, C5, CCL2, CCL3, CCL4, CCL5, CCL7, CCL8, CCL11, CCL15, CCL17, CCL19, CCL20, CCL21, CCL25 CCR3, CCR4, CD3, CD16A, CD19, CD20, CD24, CD27, CD28, CD30, CD38, CD39, CD40, CD40L, CD47, CD52, CD70, CD80, CD86, CD123, CD133, CD137, CD137L, CD160, CD272, CEACAM5, CLEC9, CLEC91, CRTH2, CSF-1, CSF-2, CSF-3, CXCL1, CXCL2, CXCL4, CXCL12, CXCL13, CXCR3, cMet, CTLA4, DLL3, DLL4, DNGR-1, E-cadherin, EGFR, ENTPD1, EpCAM, FCER1, FCER1A, FCER2, FGFR, FLAP, FOLH1, Gi24, GITR, GITRL, GPR5, GP100, GPRC5D, HER2, HER3, ICOSL, ICOS, HHLA2, HMGB1, HVEM, IDO, IFNa, IgE, IGF1R, IL2Rbeta, IL1, ILIA, IL1B, 1L1F10, IL2, IL4, IL4Ra, IL5, IL5R, IL6, IL7, IL7Ra, IL8, IL9, IL9R, IL10, rhIL1O, IL12, IL13, IL13Ra1, IL13Ra2, IL15, IL17, IL17Rb, IL18, IL22, IL23, IL25, IL7, IL33, IL35, ITGB4, ITK, KIR, LAG3, LAMP1, leptin, LPFS2, MHC class II, MUC-1, MUC-16, NCR3LG1, NKG2D, NKp46, NTPDase-1, OX40, OX40L, PD-1, PD-L1, PD-L2, PROM1, S152, SIRPalpha, SISP1, SLC, SPG64, ST2, STEAP1, STEAP2, Syk kinase, STEAP1, TROP2, TACI, TDO, TGFBETA, T14, TIGIT, TIM3, TLR, TLR2, TLR4, TLR5, TLR9, TMEF1, TNFa, TNFRSF7, Tp55, TREM1, TSLP, TSLPR, TWEAK, VEGF, VISTA, Vstm3, and WUCAM. In some aspects, the antigen binding polypeptide or polypeptide comprised within the antigen binding complex may comprise a VL1, VL2, VL3, VL4, VH1, VH2, VH3, and/or VH4 that specifically binds to A2AR, APRIL, ATPDase, BAFF, BAFFR, BCMA, BlyS, BTK, BTLA, B7DC, B7H1, B7H2, B7H3, B7H4, B7H5, B7H6, B7H7, B7RP1, B7-4, C3, C5, CCL2, CCL3, CCL4, CCL5, CCL7, CCL8, CCL11, CCL15, CCL17, CCL19, CCL20, CCL21, CCL25 CCR3, CCR4, CD3, CD16A, CD19, CD20, CD24, CD27, CD28, CD30, CD38, CD39, CD40, CD40L, CD47, CD52, CD70, CD80, CD86, CD123, CD133, CD137, CD137L, CD160, CD272, CEACAM5, CLEC9, CLEC91, CRTH2, CSF-1, CSF-2, CSF-3, CXCL1, CXCL2, CXCL4, CXCL12, CXCL13, CXCR3, cMet, CTLA4, DLL3, DLL4, DNGR-1, E-cadherin, EGFR, ENTPD1, EpCAM, FCER1, FCER1A, FCER2, FGFR, FLAP, FOLH1, Gi24, GITR, GITRL, GPR5, GP100, GPRC5D, HER2, HER3, ICOSL, ICOS, HHLA2, HMGB1, HVEM, IDO, IFNa, IgE, IGF1R, IL2Rbeta, IL1, ILIA, IL1B, IL1F10, IL2, IL4, IL4Ra, IL5, IL5R, IL6, IL7, IL7Ra, IL8, IL9, IL9R, IL10, rhIL1O, IL12, IL13, IL13Ra1, IL13Ra2, IL15, IL17, IL17Rb, IL18, IL22, IL23, IL25, IL7, IL33, IL35, ITGB4, ITK, KIR, LAG3, LAMP1, leptin, LPFS2, MHC class II, MUC-1, MUC-16, NCR3LG1, NKG2D, NKp46, NTPDase-1, OX40, OX40L, PD-1, PD-L1, PD-L2, PROM1, S152, SIRPalpha, SISP1, SLC, SPG64, ST2, STEAP1, STEAP2, Syk kinase, STEAP1, TROP2, TACI, TDO, TGFBETA, T14, TIGIT, TIM3, TLR, TLR2, TLR4, TLR5, TLR9, TMEF1, TNFa, TNFRSF7, Tp55, TREM1, TSLP, TSLPR, TWEAK, VEGF, VISTA, Vstm3, or WUCAM. For example, the antigen binding polypeptide or polypeptide comprised within the antigen binding complex may comprise a VL1 that specifically binds to A2AR, APRIL, ATPDase, BAFF, BAFFR, BCMA, BlyS, BTK, BTLA, B7DC, B7H1, B7H2, B7H3, B7H4, B7H5, B7H6, B7H7, B7RP1, B7-4, C3, C5, CCL2, CCL3, CCL4, CCL5, CCL7, CCL8, CCL11, CCL15, CCL17, CCL19, CCL20, CCL21, CCL25 CCR3, CCR4, CD3, CD16A, CD19, CD20, CD24, CD27, CD28, CD30, CD38, CD39, CD40, CD40L, CD47, CD52, CD70, CD80, CD86, CD123, CD133, CD137, CD137L, CD160, CD272, CEACAM5, CLEC9, CLEC91, CRTH2, CSF-1, CSF-2, CSF-3, CXCL1, CXCL2, CXCL4, CXCL12, CXCL13, CXCR3, cMet, CTLA4, DLL3, DLL4, DNGR-1, E-cadherin, EGFR, ENTPD1, EpCAM, FCER1, FCER1A, FCER2, FGFR, FLAP, FOLH1, Gi24, GITR, GITRL, GPR5, GP100, GPRC5D, HER2, HER3, ICOSL, ICOS, HHLA2, HMGB1, HVEM, IDO, IFNa, IgE, IGF1R, IL2Rbeta, IL1, ILIA, IL1B, IL1F10, IL2, IL4, IL4Ra, IL5, IL5R, IL6, IL7, IL7Ra, IL8, IL9, IL9R, IL10, rhIL1O, IL12, IL13, IL13Ra1, IL13Ra2, IL15, IL17, IL17Rb, IL18, IL22, IL23, IL25, IL7, IL33, IL35, ITGB4, ITK, KIR, LAG3, LAMP1, leptin, LPFS2, MHC class II, MUC-1, MUC-16, NCR3LG1, NKG2D, NKp46, NTPDase-1, OX40, OX40L, PD-1, PD-L1, PD-L2, PROM1, S152, SIRPalpha, SISP1, SLC, SPG64, ST2, STEAP1, STEAP2, Syk kinase, STEAP1, TROP2, TACI, TDO, TGFBETA, T14, TIGIT, TIM3, TLR, TLR2, TLR4, TLR5, TLR9, TMEF1, TNFa, TNFRSF7, Tp55, TREM1, TSLP, TSLPR, TWEAK, VEGF, VISTA, Vstm3, or WUCAM. For example, the antigen binding polypeptide or polypeptide comprised within the antigen binding complex may comprise a VL2 that specifically binds to A2AR, APRIL, ATPDase, BAFF, BAFFR, BCMA, BlyS, BTK, BTLA, B7DC, B7H1, B7H2, B7H3, B7H4, B7H5, B7H6, B7H7, B7RP1, B7-4, C3, C5, CCL2, CCL3, CCL4, CCL5, CCL7, CCL8, CCL11, CCL15, CCL17, CCL19, CCL20, CCL21, CCL25 CCR3, CCR4, CD3, CD16A, CD19, CD20, CD24, CD27, CD28, CD30, CD38, CD39, CD40, CD40L, CD47, CD52, CD70, CD80, CD86, CD123, CD133, CD137, CD137L, CD160, CD272, CEACAM5, CLEC9, CLEC91, CRTH2, CSF-1, CSF-2, CSF-3, CXCL1, CXCL2, CXCL4, CXCL12, CXCL13, CXCR3, cMet, CTLA4, DLL3, DLL4, DNGR-1, E-cadherin, EGFR, ENTPD1, EpCAM, FCER1, FCER1A, FCER2, FGFR, FLAP, FOLH1, Gi24, GITR, GITRL, GPR5, GP100, GPRC5D, HER2, HER3, ICOSL, ICOS, HHLA2, HMGB1, HVEM, IDO, IFNa, IgE, IGF1R, IL2Rbeta, IL1, ILIA, IL1B, IL1F10, IL2, IL4, IL4Ra, IL5, IL5R, IL6, IL7, IL7Ra, IL8, IL9, IL9R, IL10, rhIL1O, IL12, IL13, IL13Ra1, IL13Ra2, IL15, IL17, IL17Rb, IL18, IL22, IL23, IL25, IL7, IL33, IL35, ITGB4, ITK, KIR, LAG3, LAMP1, leptin, LPFS2, MHC class II, MUC-1, MUC-16, NCR3LG1, NKG2D, NKp46, NTPDase-1, OX40, OX40L, PD-1, PD-L1, PD-L2, PROM1, S152, SIRPalpha, SISP1, SLC, SPG64, ST2, STEAP1, STEAP2, Syk kinase, STEAP1, TROP2, TACI, TDO, TGFBETA, T14, TIGIT, TIM3, TLR, TLR2, TLR4, TLR5, TLR9, TMEF1, TNFa, TNFRSF7, Tp55, TREM1, TSLP, TSLPR, TWEAK, VEGF, VISTA, Vstm3, or WUCAM. For example, the antigen binding polypeptide or polypeptide comprised within the antigen binding complex may comprise a VL3 that specifically binds to A2AR, APRIL, ATPDase, BAFF, BAFFR, BCMA, BlyS, BTK, BTLA, B7DC, B7H1, B7H2, B7H3, B7H4, B7H5, B7H6, B7H7, B7RP1, B7-4, C3, C5, CCL2, CCL3, CCL4, CCL5, CCL7, CCL8, CCL11, CCL15, CCL17, CCL19, CCL20, CCL21, CCL25 CCR3, CCR4, CD3, CD16A, CD19, CD20, CD24, CD27, CD28, CD30, CD38, CD39, CD40, CD40L, CD47, CD52, CD70, CD80, CD86, CD123, CD133, CD137, CD137L, CD160, CD272, CEACAM5, CLEC9, CLEC91, CRTH2, CSF-1, CSF-2, CSF-3, CXCL1, CXCL2, CXCL4, CXCL12, CXCL13, CXCR3, cMet, CTLA4, DLL3, DLL4, DNGR-1, E-cadherin, EGFR, ENTPD1, EpCAM, FCER1, FCER1A, FCER2, FGFR, FLAP, FOLH1, Gi24, GITR, GITRL, GPR5, GP100, GPRC5D, HER2, HER3, ICOSL, ICOS, HHLA2, HMGB1, HVEM, IDO, IFNa, IgE, IGF1R, IL2Rbeta, IL1, ILIA, IL1B, IL1F10, IL2, IL4, IL4Ra, IL5, IL5R, IL6, IL7, IL7Ra, IL8, IL9, IL9R, IL10, rhIL1O, IL12, IL13, IL13Ra1, IL13Ra2, IL15, IL17, IL17Rb, IL18, IL22, IL23, IL25, IL7, IL33, IL35, ITGB4, ITK, KIR, LAG3, LAMP1, leptin, LPFS2, MHC class II, MUC-1, MUC-16, NCR3LG1, NKG2D, NKp46, NTPDase-1, OX40, OX40L, PD-1, PD-L1, PD-L2, PROM1, S152, SIRPalpha, SISP1, SLC, SPG64, ST2, STEAP1, STEAP2, Syk kinase, STEAP1, TROP2, TACI, TDO, TGFBETA, T14, TIGIT, TIM3, TLR, TLR2, TLR4, TLR5, TLR9, TMEF1, TNFa, TNFRSF7, Tp55, TREM1, TSLP, TSLPR, TWEAK, VEGF, VISTA, Vstm3, or WUCAM. For example, the antigen binding polypeptide or polypeptide comprised within the antigen binding complex may comprise a VL4 that specifically binds to A2AR, APRIL, ATPDase, BAFF, BAFFR, BCMA, BlyS, BTK, BTLA, B7DC, B7H1, B7H2, B7H3, B7H4, B7H5, B7H6, B7H7, B7RP1, B7-4, C3, C5, CCL2, CCL3, CCL4, CCL5, CCL7, CCL8, CCL11, CCL15, CCL17, CCL19, CCL20, CCL21, CCL25 CCR3, CCR4, CD3, CD16A, CD19, CD20, CD24, CD27, CD28, CD30, CD38, CD39, CD40, CD40L, CD47, CD52, CD70, CD80, CD86, CD123, CD133, CD137, CD137L, CD160, CD272, CEACAM5, CLEC9, CLEC91, CRTH2, CSF-1, CSF-2, CSF-3, CXCL1, CXCL2, CXCL4, CXCL12, CXCL13, CXCR3, cMet, CTLA4, DLL3, DLL4, DNGR-1, E-cadherin, EGFR, ENTPD1, EpCAM, FCER1, FCER1A, FCER2, FGFR, FLAP, FOLH1, Gi24, GITR, GITRL, GPR5, GP100, GPRC5D, HER2, HER3, ICOSL, ICOS, HHLA2, HMGB1, HVEM, IDO, IFNa, IgE, IGF1R, IL2Rbeta, IL1, ILIA, IL1B, IL1F10, IL2, IL4, IL4Ra, IL5, IL5R, IL6, IL7, IL7Ra, IL8, IL9, IL9R, IL10, rhIL1O, IL12, IL13, IL13Ra1, IL13Ra2, IL15, IL17, IL17Rb, IL18, IL22, IL23, IL25, IL7, IL33, IL35, ITGB4, ITK, KIR, LAG3, LAMP1, leptin, LPFS2, MHC class II, MUC-1, MUC-16, NCR3LG1, NKG2D, NKp46, NTPDase-1, OX40, OX40L, PD-1, PD-L1, PD-L2, PROM1, S152, SIRPalpha, SISP1, SLC, SPG64, ST2, STEAP1, STEAP2, Syk kinase, STEAP1, TROP2, TACI, TDO, TGFBETA, T14, TIGIT, TIM3, TLR, TLR2, TLR4, TLR5, TLR9, TMEF1, TNFa, TNFRSF7, Tp55, TREM1, TSLP, TSLPR, TWEAK, VEGF, VISTA, Vstm3, or WUCAM. For example, the antigen binding polypeptide or polypeptide comprised within the antigen binding complex may comprise a VH1 that specifically binds to A2AR, APRIL, ATPDase, BAFF, BAFFR, BCMA, BlyS, BTK, BTLA, B7DC, B7H1, B7H2, B7H3, B7H4, B7H5, B7H6, B7H7, B7RP1, B7-4, C3, C5, CCL2, CCL3, CCL4, CCL5, CCL7, CCL8, CCL11, CCL15, CCL17, CCL19, CCL20, CCL21, CCL25 CCR3, CCR4, CD3, CD16A, CD19, CD20, CD24, CD27, CD28, CD30, CD38, CD39, CD40, CD40L, CD47, CD52, CD70, CD80, CD86, CD123, CD133, CD137, CD137L, CD160, CD272, CEACAM5, CLEC9, CLEC91, CRTH2, CSF-1, CSF-2, CSF-3, CXCL1, CXCL2, CXCL4, CXCL12, CXCL13, CXCR3, cMet, CTLA4, DLL3, DLL4, DNGR-1, E-cadherin, EGFR, ENTPD1, EpCAM, FCER1, FCER1A, FCER2, FGFR, FLAP, FOLH1, Gi24, GITR, GITRL, GPR5, GP100, GPRC5D, HER2, HER3, ICOSL, ICOS, HHLA2, HMGB1, HVEM, IDO, IFNa, IgE, IGF1R, IL2Rbeta, IL1, ILIA, IL1B, IL1F10, IL2, IL4, IL4Ra, IL5, IL5R, IL6, IL7, IL7Ra, IL8, IL9, IL9R, IL10, rhIL1O, IL12, IL13, IL13Ra1, IL13Ra2, IL15, IL17, IL17Rb, IL18, IL22, IL23, IL25, IL7, IL33, IL35, ITGB4, ITK, KIR, LAG3, LAMP1, leptin, LPFS2, MHC class II, MUC-1, MUC-16, NCR3LG1, NKG2D, NKp46, NTPDase-1, OX40, OX40L, PD-1, PD-L1, PD-L2, PROM1, S152, SIRPalpha, SISP1, SLC, SPG64, ST2, STEAP1, STEAP2, Syk kinase, STEAP1, TROP2, TACI, TDO, TGFBETA, T14, TIGIT, TIM3, TLR, TLR2, TLR4, TLR5, TLR9, TMEF1, TNFa, TNFRSF7, Tp55, TREM1, TSLP, TSLPR, TWEAK, VEGF, VISTA, Vstm3, or WUCAM. For example, the antigen binding polypeptide or polypeptide comprised within the antigen binding complex may comprise a VH2 that specifically binds to A2AR, APRIL, ATPDase, BAFF, BAFFR, BCMA, BlyS, BTK, BTLA, B7DC, B7H1, B7H2, B7H3, B7H4, B7H5, B7H6, B7H7, B7RP1, B7-4, C3, C5, CCL2, CCL3, CCL4, CCLS, CCL7, CCL8, CCL11, CCL15, CCL17, CCL19, CCL20, CCL21, CCL25 CCR3, CCR4, CD3, CD16A, CD19, CD20, CD24, CD27, CD28, CD30, CD38, CD39, CD40, CD40L, CD47, CD52, CD70, CD80, CD86, CD123, CD133, CD137, CD137L, CD160, CD272, CEACAM5, CLEC9, CLEC91, CRTH2, CSF-1, CSF-2, CSF-3, CXCL1, CXCL2, CXCL4, CXCL12, CXCL13, CXCR3, cMet, CTLA4, DLL3, DLL4, DNGR-1, E-cadherin, EGFR, ENTPD1, EpCAM, FCER1, FCER1A, FCER2, FGFR, FLAP, FOLH1, Gi24, GITR, GITRL, GPR5, GP100, GPRC5D, HER2, HER3, ICOSL, ICOS, HHLA2, HMGB1, HVEM, IDO, IFNa, IgE, IGF1R, IL2Rbeta, IL1, ILIA, IL1B, IL1F10, IL2, IL4, IL4Ra, IL5, IL5R, IL6, IL7, IL7Ra, IL8, IL9, IL9R, IL10, rhIL1O, IL12, IL13, IL13Ra1, IL13Ra2, IL15, IL17, IL17Rb, IL18, IL22, IL23, IL25, IL7, IL33, IL35, ITGB4, ITK, KIR, LAG3, LAMP1, leptin, LPFS2, MHC class II, MUC-1, MUC-16, NCR3LG1, NKG2D, NKp46, NTPDase-1, OX40, OX40L, PD-1, PD-L1, PD-L2, PROM1, S152, SIRPalpha, SISP1, SLC, SPG64, ST2, STEAP1, STEAP2, Syk kinase, STEAP1, TROP2, TACI, TDO, TGFBETA, T14, TIGIT, TIM3, TLR, TLR2, TLR4, TLR5, TLR9, TMEF1, TNFa, TNFRSF7, Tp55, TREM1, TSLP, TSLPR, TWEAK, VEGF, VISTA, Vstm3, or WUCAM. For example, the antigen binding polypeptide or polypeptide comprised within the antigen binding complex may comprise a VH3 that specifically binds to A2AR, APRIL, ATPDase, BAFF, BAFFR, BCMA, BlyS, BTK, BTLA, B7DC, B7H1, B7H2, B7H3, B7H4, B7H5, B7H6, B7H7, B7RP1, B7-4, C3, C5, CCL2, CCL3, CCL4, CCLS, CCL7, CCL8, CCL11, CCL15, CCL17, CCL19, CCL20, CCL21, CCL25 CCR3, CCR4, CD3, CD16A, CD19, CD20, CD24, CD27, CD28, CD30, CD38, CD39, CD40, CD40L, CD47, CD52, CD70, CD80, CD86, CD123, CD133, CD137, CD137L, CD160, CD272, CEACAM5, CLEC9, CLEC91, CRTH2, CSF-1, CSF-2, CSF-3, CXCL1, CXCL2, CXCL4, CXCL12, CXCL13, CXCR3, cMet, CTLA4, DLL3, DLL4, DNGR-1, E-cadherin, EGFR, ENTPD1, EpCAM, FCER1, FCER1A, FCER2, FGFR, FLAP, FOLH1, Gi24, GITR, GITRL, GPR5, GP100, GPRC5D, HER2, HER3, ICOSL, ICOS, HHLA2, HMGB1, HVEM, IDO, IFNa, IgE, IGF1R, IL2Rbeta, IL1, ILIA, IL1B, IL1F10, IL2, IL4, IL4Ra, IL5, IL5R, IL6, IL7, IL7Ra, IL8, IL9, IL9R, IL10, rhIL1O, IL12, IL13, IL13Ra1, IL13Ra2, IL15, IL17, IL17Rb, IL18, IL22, IL23, IL25, IL7, IL33, IL35, ITGB4, ITK, KIR, LAG3, LAMP1, leptin, LPFS2, MHC class II, MUC-1, MUC-16, NCR3LG1, NKG2D, NKp46, NTPDase-1, OX40, OX40L, PD-1, PD-L1, PD-L2, PROM1, S152, SIRPalpha, SISP1, SLC, SPG64, ST2, STEAP1, STEAP2, Syk kinase, STEAP1, TROP2, TACI, TDO, TGFBETA, T14, TIGIT, TIM3, TLR, TLR2, TLR4, TLR5, TLR9, TMEF1, TNFa, TNFRSF7, Tp55, TREM1, TSLP, TSLPR, TWEAK, VEGF, VISTA, Vstm3, or WUCAM. For example, the antigen binding polypeptide or polypeptide comprised within the antigen binding complex may comprise a VH4 that specifically binds to A2AR, APRIL, ATPDase, BAFF, BAFFR, BCMA, BlyS, BTK, BTLA, B7DC, B7H1, B7H2, B7H3, B7H4, B7H5, B7H6, B7H7, B7RP1, B7-4, C3, C5, CCL2, CCL3, CCL4, CCL5, CCL7, CCL8, CCL11, CCL15, CCL17, CCL19, CCL20, CCL21, CCL25 CCR3, CCR4, CD3, CD16A, CD19, CD20, CD24, CD27, CD28, CD30, CD38, CD39, CD40, CD40L, CD47, CD52, CD70, CD80, CD86, CD123, CD133, CD137, CD137L, CD160, CD272, CEACAM5, CLEC9, CLEC91, CRTH2, CSF-1, CSF-2, CSF-3, CXCL1, CXCL2, CXCL4, CXCL12, CXCL13, CXCR3, cMet, CTLA4, DLL3, DLL4, DNGR-1, E-cadherin, EGFR, ENTPD1, EpCAM, FCER1, FCER1A, FCER2, FGFR, FLAP, FOLH1, Gi24, GITR, GITRL, GPR5, GP100, GPRC5D, HER2, HER3, ICOSL, ICOS, HHLA2, HMGB1, HVEM, IDO, IFNa, IgE, IGF1R, IL2Rbeta, IL1, ILIA, IL1B, IL1F10, IL2, IL4, IL4Ra, IL5, IL5R, IL6, IL7, IL7Ra, IL8, IL9, IL9R, IL10, rhIL1O, IL12, IL13, IL13Ra1, IL13Ra2, IL15, IL17, IL17Rb, IL18, IL22, IL23, IL25, IL7, IL33, IL35, ITGB4, ITK, KIR, LAG3, LAMP1, leptin, LPFS2, MHC class II, MUC-1, MUC-16, NCR3LG1, NKG2D, NKp46, NTPDase-1, OX40, OX40L, PD-1, PD-L1, PD-L2, PROM1, S152, SIRPalpha, SISP1, SLC, SPG64, ST2, STEAP1, STEAP2, Syk kinase, STEAP1, TROP2, TACI, TDO, TGFBETA, T14, TIGIT, TIM3, TLR, TLR2, TLR4, TLR5, TLR9, TMEF1, TNFa, TNFRSF7, Tp55, TREM1, TSLP, TSLPR, TWEAK, VEGF, VISTA, Vstm3, or WUCAM. For example, VL1 may specifically bind CD3. For example, VL1 may specifically bind CD19. For example, VL1 may specifically bind HER2. For example, VL1 may specifically bind CD20. For example, VL1 may specifically bind CD28. For example, VL1 may specifically bind CD38. For example, VL1 may specifically bind Trop2. For example, VL1 may specifically bind cMet. For example, VL2 may specifically bind CD3. For example, VL2 may specifically bind CD19. For example, VL2 may specifically bind HER2. For example, VL2 may specifically bind CD20. For example, VL2 may specifically bind CD28. For example, VL2 may specifically bind CD38. For example, VL2 may specifically bind Trop2. For example, VL2 may specifically bind cMet. For example, VL3 may specifically bind CD3. For example, VL3 may specifically bind CD19. For example, VL3 may specifically bind HER2. For example, VL3 may specifically bind CD20. For example, VL3 may specifically bind CD28. For example, VL3 may specifically bind CD38. For example, VL3 may specifically bind Trop2. For example, VL3 may specifically bind cMet. For example, VL4 may specifically bind CD3. For example, VL4 may specifically bind CD19. For example, VL4 may specifically bind HER2. For example, VL4 may specifically bind CD20. For example, VL4 may specifically bind CD28. For example, VL4 may specifically bind CD38. For example, VL4 may specifically bind Trop2. For example, VL4 may specifically bind cMet. For example, VH1 may specifically bind CD3. For example, VH1 may specifically bind CD19. For example, VH1 may specifically bind HER2. For example, VH1 may specifically bind CD20. For example, VH1 may specifically bind CD28. For example, VH1 may specifically bind CD38. For example, VH1 may specifically bind Trop2. For example, VH1 may specifically bind cMet. For example, VH2 may specifically bind CD3. For example, VH2 may specifically bind CD19. For example, VH2 may specifically bind HER2. For example, VH2 may specifically bind CD20. For example, VH2 may specifically bind CD28. For example, VH2 may specifically bind CD38. For example, VH2 may specifically bind Trop2. For example, VH2 may specifically bind cMet. For example, VH3 may specifically bind CD3. For example, VH3 may specifically bind CD19. For example, VH3 may specifically bind HER2. For example, VH3 may specifically bind CD20. For example, VH3 may specifically bind CD28. For example, VH3 may specifically bind CD38. For example, VH3 may specifically bind Trop2. For example, VH4 may specifically bind CD3. For example, VH4 may specifically bind CD19. For example, VH4 may specifically bind HER2. For example, VH4 may specifically bind CD20. For example, VH4 may specifically bind CD28. For example, VH4 may specifically bind CD38. For example, VH4 may specifically bind Trop2. For example, VH4 may specifically bind cMet. In some aspects, the VH1 and VL1 of the antigen binding polypeptide or antigen binding polypeptide complex specifically binds to CD28, VH2 and VL2 specifically bind to CD3, and VH3 and VL3 specifically bind to CD38. In some aspects, the VH1 and VL1 of the antigen binding polypeptide or antigen binding polypeptide complex specifically binds to CD28, VH2 and VL2 specifically bind to CD38, and VH3 and VL3 specifically bind to CD3. In some aspects, the VH1 and VL1 of the antigen binding polypeptide or antigen binding polypeptide complex specifically binds to CD3, VH2 and VL2 specifically bind to CD38, and VH3 and VL3 specifically bind to CD28. In some aspects, the VH1 and VL1 of the antigen binding polypeptide or antigen binding polypeptide complex specifically binds to CD3, VH2 and VL2 specifically bind to CD28, and VH3 and VL3 specifically bind to CD38. In some aspects, the VH1 and VL1 of the antigen binding polypeptide or antigen binding polypeptide complex specifically binds to CD38, VH2 and VL2 specifically bind to CD28, and VH3 and VL3 specifically bind to CD3. In some aspects, the VH1 and VL1 of the antigen binding polypeptide or antigen binding polypeptide complex specifically binds to CD38, VH2 and VL2 specifically bind to CD3, and VH3 and VL3 specifically bind to CD28. In some aspects, the VH1 and VL1 of the antigen binding polypeptide or antigen binding polypeptide complex specifically binds to CD28, VH2 and VL2 specifically bind to CD19, and VH3 and VL3 specifically bind to CD38. In some aspects, the VH1 and VL1 of the antigen binding polypeptide or antigen binding polypeptide complex specifically binds to CD28, VH2 and VL2 specifically bind to CD38, and VH3 and VL3 specifically bind to CD19. In some aspects, the VH1 and VL1 of the antigen binding polypeptide or antigen binding polypeptide complex specifically binds to CD19, VH2 and VL2 specifically bind to CD38, and VH3 and VL3 specifically bind to CD28. In some aspects, the VH1 and VL1 of the antigen binding polypeptide or antigen binding polypeptide complex specifically binds to CD19, VH2 and VL2 specifically bind to CD28, and VH3 and VL3 specifically bind to CD38. In some aspects, the VH1 and VL1 of the antigen binding polypeptide or antigen binding polypeptide complex specifically binds to CD38, VH2 and VL2 specifically bind to CD28, and VH3 and VL3 specifically bind to CD19. In some aspects, the VH1 and VL1 of the antigen binding polypeptide or antigen binding polypeptide complex specifically binds to CD38, VH2 and VL2 specifically bind to CD19, and VH3 and VL3 specifically bind to CD28. For example, the invention is directed to an antigen binding polypeptide or antigen binding polypeptide complex that specifically binds to EGFR and cMet. For example, the invention is directed to an antigen binding polypeptide or antigen binding polypeptide complex that specifically binds to GP100 and CD3. For example, the invention is directed to an antigen binding polypeptide or antigen binding polypeptide complex that specifically binds to CD20 and CD3. For example, the invention is directed to an antigen binding polypeptide or antigen binding polypeptide complex that specifically binds to BCMA and CD3. For example, the invention is directed to an antigen binding polypeptide or antigen binding polypeptide complex that specifically binds to PDL1 and CTLA4. For example, the invention is directed to an antigen binding polypeptide or antigen binding polypeptide complex that specifically binds to PD1 and LAG3. For example, the invention is directed to an antigen binding polypeptide or antigen binding polypeptide complex that specifically binds to PD1 and VEGF For example, the invention is directed to an antigen binding polypeptide or antigen binding polypeptide complex that specifically binds to DLL4 and VEGF. For example, the invention is directed to an antigen binding polypeptide or antigen binding polypeptide complex that specifically binds to EGFR and HER3. For example, the invention is directed to an antigen binding polypeptide or antigen binding polypeptide complex that specifically binds to HER2. For example, the invention is directed to an antigen binding polypeptide or antigen binding polypeptide complex that specifically binds to EpCAM and CD3. For example, the invention is directed to an antigen binding polypeptide or antigen binding polypeptide complex that specifically binds to PDL1 and TGFbeta. For example, the invention is directed to an antigen binding polypeptide or antigen binding polypeptide complex that specifically binds to PDL1 and TGFbeta. For example, the invention is directed to an antigen binding polypeptide or antigen binding polypeptide complex that specifically binds to GPRC5D and CD3. For example, the invention is directed to an antigen binding polypeptide or antigen binding polypeptide complex that specifically binds to CD123 and CD3. For example, the invention is directed to an antigen binding polypeptide or antigen binding polypeptide complex that specifically binds to CD30 and CD16A. For example, the invention is directed to an antigen binding polypeptide or antigen binding polypeptide complex that specifically binds to DLL3 and CD3. For example, the antigen binding polypeptide or antigen binding polypeptide complex specifically binds at least one epitope on each of EGFR and cMet. For example, the antigen binding polypeptide or antigen binding polypeptide complex specifically binds at least one epitope on each of GP100 and CD3. For example, the antigen binding polypeptide or antigen binding polypeptide complex specifically binds at least one epitope on each of CD20 and CD3. For example, the antigen binding polypeptide or antigen binding polypeptide complex specifically binds at least one epitope on each of BCMA and CD3. For example, the antigen binding polypeptide or antigen binding polypeptide complex specifically binds at least one epitope on each of PDL1 and CTLA4. For example, the antigen binding polypeptide or antigen binding polypeptide complex specifically binds at least one epitope on each of PD1 and LAG3. For example, the antigen binding polypeptide or antigen binding polypeptide complex specifically binds at least one epitope on each of PD1 and VEGF. For example, the antigen binding polypeptide or antigen binding polypeptide complex specifically binds at least one epitope on each of DLL4 and VEGF. For example, the antigen binding polypeptide or antigen binding polypeptide complex specifically binds at least one epitope on each of EGFR and HER3. For example, the antigen binding polypeptide or antigen binding polypeptide complex specifically binds at least one epitope on HER2. For example, the antigen binding polypeptide or antigen binding polypeptide complex specifically binds at least one epitope on each of EpCAM and CD3. For example, the antigen binding polypeptide or antigen binding polypeptide complex specifically binds at least one epitope on each of PDL1 and TGFbeta. For example, the antigen binding polypeptide or antigen binding polypeptide complex specifically binds at least one epitope on each of PDL1 and TGFbeta. For example, the antigen binding polypeptide or antigen binding polypeptide complex specifically binds at least one epitope on each of GPRC5D and CD3. For example, the antigen binding polypeptide or antigen binding polypeptide complex specifically binds at least one epitope on each of CD123 and CD3. For example, the antigen binding polypeptide or antigen binding polypeptide complex specifically binds at least one epitope on each of CD30 and CD16A. For example, the antigen binding polypeptide or antigen binding polypeptide complex specifically binds at least one epitope on each of DLL3 and CD3. For example, the antigen binding polypeptide or polypeptide comprised within the antigen binding complex may comprise a VL1, VL2, VL3, VL4, VH1, VH2, VH3, and/or VH4 that specifically binds to EGFR and a VL1, VL2, VL3, VL4, VH1, VH2, VH3, and/or VH4 that specifically binds to cMet. For example, the antigen binding polypeptide or polypeptide comprised within the antigen binding complex may comprise a VL1, VL2, VL3, VL4, VH1, VH2, VH3, and/or VH4 that specifically binds to GP100 and a VL1, VL2, VL3, VL4, VH1, VH2, VH3, and/or VH4 that specifically binds to CD3. For example, the antigen binding polypeptide or polypeptide comprised within the antigen binding complex may comprise a VL1, VL2, VL3, VL4, VH1, VH2, VH3, and/or VH4 that specifically binds to CD20 and a VL1, VL2, VL3, VL4, VH1, VH2, VH3, and/or VH4 that specifically binds to CD3. For example, the antigen binding polypeptide or polypeptide comprised within the antigen binding complex may comprise a VL1, VL2, VL3, VL4, VH1, VH2, VH3, and/or VH4 that specifically binds to BCMA and a VL1, VL2, VL3, VL4, VH1, VH2, VH3, and/or VH4 that specifically binds to CD3. For example, the antigen binding polypeptide or polypeptide comprised within the antigen binding complex may comprise a VL1, VL2, VL3, VL4, VH1, VH2, VH3, and/or VH4 that specifically binds to PDL1 and a VL1, VL2, VL3, VL4, VH1, VH2, VH3, and/or VH4 that specifically binds to CTLA4. For example, the antigen binding polypeptide or polypeptide comprised within the antigen binding complex may comprise a VL1, VL2, VL3, VL4, VH1, VH2, VH3, and/or VH4 that specifically binds to PD1 and a VL1, VL2, VL3, VL4, VH1, VH2, VH3, and/or VH4 that specifically binds to LAG3. For example, the antigen binding polypeptide or polypeptide comprised within the antigen binding complex may comprise a VL1, VL2, VL3, VL4, VH1, VH2, VH3, and/or VH4 that specifically binds to PD1 and a VL1, VL2, VL3, VL4, VH1, VH2, VH3, and/or VH4 that specifically binds to VEGF. For example, the antigen binding polypeptide or polypeptide comprised within the antigen binding complex may comprise a VL1, VL2, VL3, VL4, VH1, VH2, VH3, and/or VH4 that specifically binds to DLL4 and a VL1, VL2, VL3, VL4, VH1, VH2, VH3, and/or VH4 that specifically binds to VEGF. For example, the antigen binding polypeptide or polypeptide comprised within the antigen binding complex may comprise a VL1, VL2, VL3, VL4, VH1, VH2, VH3, and/or VH4 that specifically binds to EGFR and a VL1, VL2, VL3, VL4, VH1, VH2, VH3, and/or VH4 that specifically binds to HER3. For example, the antigen binding polypeptide or polypeptide comprised within the antigen binding complex may comprise a VL1, VL2, VL3, VH1, VH2, and/or VH3 that specifically binds to HER2 and a VL1, VL2, VL3, VL4, VH1, VH2, VH3, and/or VH4 that specifically binds to HER2. For example, the antigen binding polypeptide or polypeptide comprised within the antigen binding complex may comprise a VL1, VL2, VL3, VL4, VH1, VH2, VH3, and/or VH4 that specifically binds to EpCAM and a VL1, VL2, VL3, VL4, VH1, VH2, VH3, and/or VH4 that specifically binds to CD3. For example, the antigen binding polypeptide or polypeptide comprised within the antigen binding complex may comprise a VL1, VL2, VL3, VL4, VH1, VH2, VH3, and/or VH4 that specifically binds to PDL1 and a VL1, VL2, VL3, VL4, VH1, VH2, VH3, and/or VH4 that specifically binds to TGFbeta. For example, the antigen binding polypeptide or polypeptide comprised within the antigen binding complex may comprise a VL1, VL2, VL3, VL4, VH1, VH2, VH3, and/or VH4 that specifically binds to PDL1 and a VL1, VL2, VL3, VL4, VH1, VH2, VH3, and/or VH4 that specifically binds to TGFbeta. For example, the antigen binding polypeptide or polypeptide comprised within the antigen binding complex may comprise a VL1, VL2, VL3, VH1, VH2, and/or VH3 that specifically binds to GPRC5D and a VL1, VL2, VL3, VL4, VH1, VH2, VH3, and/or VH4 that specifically binds to CD3. For example, the antigen binding polypeptide or polypeptide comprised within the antigen binding complex may comprise a VL1, VL2, VL3, VL4, VH1, VH2, VH3, and/or VH4 that specifically binds to CD123 and a VL1, VL2, VL3, VL4, VH1, VH2, VH3, and/or VH4 that specifically binds to CD3. For example, the antigen binding polypeptide or polypeptide comprised within the antigen binding complex may comprise a VL1, VL2, VL3, VL4, VH1, VH2, VH3, and/or VH4 that specifically binds to CD30 and a VL1, VL2, VL3, VL4, VH1, VH2, VH3, and/or VH4 that specifically binds to CD16A. For example, the antigen binding polypeptide or polypeptide comprised within the antigen binding complex may comprise a VL1, VL2, VL3, VL4, VH1, VH2, VH3, and/or VH4 that specifically binds to DLL3 and a VL1, VL2, VL3, VL4, VH1, VH2, VH3, and/or VH4 that specifically binds to CD3. Any of the antigen binding polypeptide structures and any of the antigen binding polypeptide complex structures described herein may be used to target one or more of the targets described herein. Any and all disclosure herein in relation to targets for antigen binding polypeptides of the invention is generally applicable, and applies equally and without reservation to each and every antigen binding polypeptide and antigen binding polypeptide complex described herein. For the avoidance of doubt, the VL1, VL2, VL3, VL4, VH1, VH2, VH3, and/or VH4 of each and every antigen binding polypeptide and antigen binding polypeptide complex described herein may independently bind to any one of said particularly preferred targets.

[0154] In other aspects, the invention is directed to an antigen binding polypeptide or antigen binding polypeptide complex that specifically binds to Ang-2 and VEGF-A. For example, the antigen binding polypeptide or antigen binding polypeptide complex specifically binds at least one epitope on each of Ang-2 and VEGF-A. For example, the antigen binding polypeptide or polypeptide comprised within the antigen binding complex may comprise a VL1, VL2, VL3, VL4, VH1, VH2, VH3, and/or VH4 that specifically binds to Ang-2 and a VL1, VL2, VL3, VL4, VH1, VH2, VH3, and/or VH4 that specifically binds to VEGF-A.

[0155] In other aspects, the invention is directed to an antigen binding polypeptide or antigen binding polypeptide complex that specifically binds to Factor IXa and Factor X. For example, the antigen binding polypeptide or antigen binding polypeptide complex specifically binds at least one epitope on each of Factor IXa and Factor X. For example, the antigen binding polypeptide or polypeptide comprised within the antigen binding complex may comprise a VL1, VL2, VL3, VL4, VH1, VH2, VH3, and/or VH4 that specifically binds to Factor IXa and a VL1, VL2, VL3, VL4, VH1, VH2, VH3, and/or VH4 that specifically binds to Factor X.

[0156] In some aspects, the antigen binding polypeptide has a structure represented by VL1-VL2-VH2-VH1; VH1-VH2-VL2-VL1; VL1-L1-VL2-L2-VH2-L3-VH1; or VH1-L1-VH2-L2-VL2-L3-VL1; wherein VL1 is a first immunoglobulin light chain variable region that specifically binds to A2AR, APRIL, ATPDase, BAFF, BAFFR, BCMA, BlyS, BTK, BTLA, B7DC, B7H1, B7H2, B7H3, B7H4, B7H5, B7H6, B7H7, B7RP1, B7-4, C3, C5, CCL2, CCL3, CCL4, CCL5, CCL7, CCL8, CCL11, CCL15, CCL17, CCL19, CCL20, CCL21, CCL25 CCR3, CCR4, CD3, CD16A, CD19, CD20, CD24, CD27, CD28, CD30, CD38, CD39, CD40, CD40L, CD47, CD52, CD70, CD80, CD86, CD123, CD133, CD137, CD137L, CD160, CD272, CEACAM5, CLEC9, CLEC91, CRTH2, CSF-1, CSF-2, CSF-3, CXCL1, CXCL2, CXCL4, CXCL12, CXCL13, CXCR3, cMet, CTLA4, DLL3, DLL4, DNGR-1, E-cadherin, EGFR, ENTPD1, EpCAM, FCER1, FCER1A, FCER2, FGFR, FLAP, FOLH1, Gi24, GITR, GITRL, GPR5, GP100, GPRC5D, HER2, HER3, ICOSL, ICOS, HHLA2, HMGB1, HVEM, IDO, IFNa, IgE, IGF1R, IL2Rbeta, IL1, ILIA, IL1B, IL1F10, IL2, IL4, IL4Ra, IL5, IL5R, IL6, IL7, IL7Ra, IL8, IL9, IL9R, IL10, rhIL1O, IL12, IL13, IL13Ra1, IL13Ra2, IL15, IL17, IL17Rb, IL18, IL22, IL23, IL25, IL7, IL33, IL35, ITGB4, ITK, KIR, LAG3, LAMP1, leptin, LPFS2, MHC class II, MUC-1, MUC-16, NCR3LG1, NKG2D, NKp46, NTPDase-1, OX40, OX40L, PD-1, PD-L1, PD-L2, PROM1, S152, SIRPalpha, SISP1, SLC, SPG64, ST2, STEAP1, STEAP2, Syk kinase, STEAP1, TROP2, TACI, TDO, TGFBETA, T14, TIGIT, TIM3, TLR, TLR2, TLR4, TLR5, TLR9, TMEF1, TNFa, TNFRSF7, Tp55, TREM1, TSLP, TSLPR, TWEAK, VEGF, VISTA, Vstm3, or WUCAM; VH1 is a first immunoglobulin heavy chain variable region that specifically binds to A2AR, APRIL, ATPDase, BAFF, BAFFR, BCMA, BlyS, BTK, BTLA, B7DC, B7H1, B7H2, B7H3, B7H4, B7H5, B7H6, B7H7, B7RP1, B7-4, C3, C5, CCL2, CCL3, CCL4, CCL5, CCL7, CCL8, CCL11, CCL15, CCL17, CCL19, CCL20, CCL21, CCL25 CCR3, CCR4, CD3, CD16A, CD19, CD20, CD24, CD27, CD28, CD30, CD38, CD39, CD40, CD40L, CD47, CD52, CD70, CD80, CD86, CD123, CD133, CD137, CD137L, CD160, CD272, CEACAM5, CLEC9, CLEC91, CRTH2, CSF-1, CSF-2, CSF-3, CXCL1, CXCL2, CXCL4, CXCL12, CXCL13, CXCR3, cMet, CTLA4, DLL3, DLL4, DNGR-1, E-cadherin, EGFR, ENTPD1, EpCAM, FCER1, FCER1A, FCER2, FGFR, FLAP, FOLH1, Gi24, GITR, GITRL, GPR5, GP100, GPRC5D, HER2, HER3, ICOSL, ICOS, HHLA2, HMGB1, HVEM, IDO, IFNa, IgE, IGF1R, IL2Rbeta, IL1, ILIA, IL1B, IL1F10, IL2, IL4, IL4Ra, IL5, IL5R, IL6, IL7, IL7Ra, IL8, IL9, IL9R, IL10, rhIL1O, IL12, IL13, IL13Ra1, IL13Ra2, IL15, IL17, IL17Rb, IL18, IL22, IL23, IL25, IL7, IL33, IL35, ITGB4, ITK, KIR, LAG3, LAMP1, leptin, LPFS2, MHC class II, MUC-1, MUC-16, NCR3LG1, NKG2D, NKp46, NTPDase-1, OX40, OX40L, PD-1, PD-L1, PD-L2, PROM1, S152, SIRPalpha, SISP1, SLC, SPG64, ST2, STEAP1, STEAP2, Syk kinase, STEAP1, TROP2, TACI, TDO, TGFBETA, T14, TIGIT, TIM3, TLR, TLR2, TLR4, TLR5, TLR9, TMEF1, TNFa, TNFRSF7, Tp55, TREM1, TSLP, TSLPR, TWEAK, VEGF, VISTA, Vstm3, or WUCAM; VH2 is a second immunoglobulin heavy chain variable region that specifically binds to A2AR, APRIL, ATPDase, BAFF, BAFFR, BCMA, BlyS, BTK, BTLA, B7DC, B7H1, B7H2, B7H3, B7H4, B7H5, B7H6, B7H7, B7RP1, B7-4, C3, C5, CCL2, CCL3, CCL4, CCL5, CCL7, CCL8, CCL11, CCL15, CCL17, CCL19, CCL20, CCL21, CCL25 CCR3, CCR4, CD3, CD16A, CD19, CD20, CD24, CD27, CD28, CD30, CD38, CD39, CD40, CD40L, CD47, CD52, CD70, CD80, CD86, CD123, CD133, CD137, CD137L, CD160, CD272, CEACAM5, CLEC9, CLEC91, CRTH2, CSF-1, CSF-2, CSF-3, CXCL1, CXCL2, CXCL4, CXCL12, CXCL13, CXCR3, cMet, CTLA4, DLL3, DLL4, DNGR-1, E-cadherin, EGFR, ENTPD1, EpCAM, FCER1, FCER1A, FCER2, FGFR, FLAP, FOLH1, Gi24, GITR, GITRL, GPR5, GP100, GPRC5D, HER2, HER3, ICOSL, ICOS, HHLA2, HMGB1, HVEM, IDO, IFNa, IgE, IGF1R, IL2Rbeta, IL1, ILIA, IL1B, IL1F10, IL2, IL4, IL4Ra, IL5, IL5R, IL6, IL7, IL7Ra, IL8, IL9, IL9R, IL10, rhIL1O, IL12, IL13, IL13Ra1, IL13Ra2, IL15, IL17, IL17Rb, IL18, IL22, IL23, IL25, IL7, IL33, IL35, ITGB4, ITK, KIR, LAG3, LAMP1, leptin, LPFS2, MHC class II, MUC-1, MUC-16, NCR3LG1, NKG2D, NKp46, NTPDase-1, OX40, OX40L, PD-1, PD-L1, PD-L2, PROM1, S152, SIRPalpha, SISP1, SLC, SPG64, ST2, STEAP1, STEAP2, Syk kinase, STEAP1, TROP2, TACI, TDO, TGFBETA, T14, TIGIT, TIM3, TLR, TLR2, TLR4, TLR5, TLR9, TMEF1, TNFa, TNFRSF7, Tp55, TREM1, TSLP, TSLPR, TWEAK, VEGF, VISTA, Vstm3, or WUCAM; and L1, L2 and L3 are amino acid linkers. In some aspects, the antigen binding polypeptide has a structure represented by VL1-VL2-VH2-VH1, wherein VL1, VL2, VH1 and/or VH2 specifically binds to A2AR, APRIL, ATPDase, BAFF, BAFFR, BCMA, BlyS, BTK, BTLA, B7DC, B7H1, B7H2, B7H3, B7H4, B7H5, B7H6, B7H7, B7RP1, B7-4, C3, C5, CCL2, CCL3, CCL4, CCL5, CCL7, CCL8, CCL11, CCL15, CCL17, CCL19, CCL20, CCL21, CCL25 CCR3, CCR4, CD3, CD16A, CD19, CD20, CD24, CD27, CD28, CD30, CD38, CD39, CD40, CD40L, CD47, CD52, CD70, CD80, CD86, CD123, CD133, CD137, CD137L, CD160, CD272, CEACAM5, CLEC9, CLEC91, CRTH2, CSF-1, CSF-2, CSF-3, CXCL1, CXCL2, CXCL4, CXCL12, CXCL13, CXCR3, cMet, CTLA4, DLL3, DLL4, DNGR-1, E-cadherin, EGFR, ENTPD1, EpCAM, FCER1, FCER1A, FCER2, FGFR, FLAP, FOLH1, Gi24, GITR, GITRL, GPR5, GP100, GPRC5D, HER2, HER3, ICOSL, ICOS, HHLA2, HMGB1, HVEM, IDO, IFNa, IgE, IGF1R, IL2Rbeta, IL1, ILIA, IL1B, IL1F10, IL2, IL4, IL4Ra, IL5, IL5R, IL6, IL7, IL7Ra, IL8, IL9, IL9R, IL10, rhIL1O, IL12, IL13, IL13Ra1, IL13Ra2, IL15, IL17, IL17Rb, IL18, IL22, IL23, IL25, IL7, IL33, IL35, ITGB4, ITK, KIR, LAG3, LAMP1, leptin, LPFS2, MHC class II, MUC-1, MUC-16, NCR3LG1, NKG2D, NKp46, NTPDase-1, OX40, OX40L, PD-1, PD-L1, PD-L2, PROM1, S152, SIRPalpha, SISP1, SLC, SPG64, ST2, STEAP1, STEAP2, Syk kinase, STEAP1, TROP2, TACI, TDO, TGFBETA, T14, TIGIT, TIM3, TLR, TLR2, TLR4, TLR5, TLR9, TMEF1, TNFa, TNFRSF7, Tp55, TREM1, TSLP, TSLPR, TWEAK, VEGF, VISTA, Vstm3, or WUCAM. In some aspects, the antigen binding polypeptide has a structure represented by VH1-VH2-VL2-VL1, wherein VL1, VL2, VH1 and/or VH2 specifically binds to A2AR, APRIL, ATPDase, BAFF, BAFFR, BCMA, BlyS, BTK, BTLA, B7DC, B7H1, B7H2, B7H3, B7H4, B7H5, B7H6, B7H7, B7RP1, B7-4, C3, C5, CCL2, CCL3, CCL4, CCL5, CCL7, CCL8, CCL11, CCL15, CCL17, CCL19, CCL20, CCL21, CCL25 CCR3, CCR4, CD3, CD16A, CD19, CD20, CD24, CD27, CD28, CD30, CD38, CD39, CD40, CD40L, CD47, CD52, CD70, CD80, CD86, CD123, CD133, CD137, CD137L, CD160, CD272, CEACAM5, CLEC9, CLEC91, CRTH2, CSF-1, CSF-2, CSF-3, CXCL1, CXCL2, CXCL4, CXCL12, CXCL13, CXCR3, cMet, CTLA4, DLL3, DLL4, DNGR-1, E-cadherin, EGFR, ENTPD1, EpCAM, FCER1, FCER1A, FCER2, FGFR, FLAP, FOLH1, Gi24, GITR, GITRL, GPR5, GP100, GPRC5D, HER2, HER3, ICOSL, ICOS, HHLA2, HMGB1, HVEM, IDO, IFNa, IgE, IGF1R, IL2Rbeta, IL1, ILIA, IL1B, IL1F10, IL2, IL4, IL4Ra, IL5, IL5R, IL6, IL7, IL7Ra, IL8, IL9, IL9R, IL10, rhIL1O, IL12, IL13, IL13Ra1, IL13Ra2, IL15, IL17, IL17Rb, IL18, IL22, IL23, IL25, IL7, IL33, IL35, ITGB4, ITK, KIR, LAG3, LAMP1, leptin, LPFS2, MHC class II, MUC-1, MUC-16, NCR3LG1, NKG2D, NKp46, NTPDase-1, OX40, OX40L, PD-1, PD-L1, PD-L2, PROM1, S152, SIRPalpha, SISP1, SLC, SPG64, ST2, STEAP1, STEAP2, Syk kinase, STEAP1, TROP2, TACI, TDO, TGFBETA, T14, TIGIT, TIM3, TLR, TLR2, TLR4, TLR5, TLR9, TMEF1, TNFa, TNFRSF7, Tp55, TREM1, TSLP, TSLPR, TWEAK, VEGF, VISTA, Vstm3, or WUCAM. In some aspects, the antigen binding polypeptide has a structure represented by VL1-L1-VL2-L2-VH2-L3-VH1, wherein VL1, VL2, VH1 and/or VH2 specifically binds to A2AR, APRIL, ATPDase, BAFF, BAFFR, BCMA, BlyS, BTK, BTLA, B7DC, B7H1, B7H2, B7H3, B7H4, B7H5, B7H6, B7H7, B7RP1, B7-4, C3, C5, CCL2, CCL3, CCL4, CCL5, CCL7, CCL8, CCL11, CCL15, CCL17, CCL19, CCL20, CCL21, CCL25 CCR3, CCR4, CD3, CD16A, CD19, CD20, CD24, CD27, CD28, CD30, CD38, CD39, CD40, CD40L, CD47, CD52, CD70, CD80, CD86, CD123, CD133, CD137, CD137L, CD160, CD272, CEACAM5, CLEC9, CLEC91, CRTH2, CSF-1, CSF-2, CSF-3, CXCL1, CXCL2, CXCL4, CXCL12, CXCL13, CXCR3, cMet, CTLA4, DLL3, DLL4, DNGR-1, E-cadherin, EGFR, ENTPD1, EpCAM, FCER1, FCER1A, FCER2, FGFR, FLAP, FOLH1, Gi24, GITR, GITRL, GPR5, GP100, GPRC5D, HER2, HER3, ICOSL, ICOS, HHLA2, HMGB1, HVEM, IDO, IFNa, IgE, IGF1R, IL2Rbeta, IL1, ILIA, IL1B, IL1F10, IL2, IL4, IL4Ra, IL5, IL5R, IL6, IL7, IL7Ra, IL8, IL9, IL9R, IL10, rhIL1O, IL12, IL13, IL13Ra1, IL13Ra2, IL15, IL17, IL17Rb, IL18, IL22, IL23, IL25, IL7, IL33, IL35, ITGB4, ITK, KIR, LAG3, LAMP1, leptin, LPFS2, MHC class II, MUC-1, MUC-16, NCR3LG1, NKG2D, NKp46, NTPDase-1, OX40, OX40L, PD-1, PD-L1, PD-L2, PROM1, S152, SIRPalpha, SISP1, SLC, SPG64, ST2, STEAP1, STEAP2, Syk kinase, STEAP1, TROP2, TACI, TDO, TGFBETA, T14, TIGIT, TIM3, TLR, TLR2, TLR4, TLR5, TLR9, TMEF1, TNFa, TNFRSF7, Tp55, TREM1, TSLP, TSLPR, TWEAK, VEGF, VISTA, Vstm3, or WUCAM. In some aspects, the antigen binding polypeptide has a structure represented by VH1-L1-VH2-L2-VL2-L3-VL1, wherein VL1, VL2, VH1 and/or VH2 specifically binds to A2AR, APRIL, ATPDase, BAFF, BAFFR, BCMA, BlyS, BTK, BTLA, B7DC, B7H1, B7H2, B7H3, B7H4, B7H5, B7H6, B7H7, B7RP1, B7-4, C3, C5, CCL2, CCL3, CCL4, CCL5, CCL7, CCL8, CCL11, CCL15, CCL17, CCL19, CCL20, CCL21, CCL25 CCR3, CCR4, CD3, CD16A, CD19, CD20, CD24, CD27, CD28, CD30, CD38, CD39, CD40, CD40L, CD47, CD52, CD70, CD80, CD86, CD123, CD133, CD137, CD137L, CD160, CD272, CEACAM5, CLEC9, CLEC91, CRTH2, CSF-1, CSF-2, CSF-3, CXCL1, CXCL2, CXCL4, CXCL12, CXCL13, CXCR3, cMet, CTLA4, DLL3, DLL4, DNGR-1, E-cadherin, EGFR, ENTPD1, EpCAM, FCER1, FCER1A, FCER2, FGFR, FLAP, FOLH1, Gi24, GITR, GITRL, GPR5, GP100, GPRC5D, HER2, HER3, ICOSL, ICOS, HHLA2, HMGB1, HVEM, IDO, IFNa, IgE, IGF1R, IL2Rbeta, IL1, ILIA, IL1B, IL1F10, IL2, IL4, IL4Ra, IL5, IL5R, IL6, IL7, IL7Ra, IL8, IL9, IL9R, IL10, rhIL1O, IL12, IL13, IL13Ra1, IL13Ra2, IL15, IL17, IL17Rb, IL18, IL22, IL23, IL25, IL7, IL33, IL35, ITGB4, ITK, KIR, LAG3, LAMP1, leptin, LPFS2, MHC class II, MUC-1, MUC-16, NCR3LG1, NKG2D, NKp46, NTPDase-1, OX40, OX40L, PD-1, PD-L1, PD-L2, PROM1, S152, SIRPalpha, SISP1, SLC, SPG64, ST2, STEAP1, STEAP2, Syk kinase, STEAP1, TROP2, TACI, TDO, TGFBETA, T14, TIGIT, TIM3, TLR, TLR2, TLR4, TLR5, TLR9, TMEF1, TNFa, TNFRSF7, Tp55, TREM1, TSLP, TSLPR, TWEAK, VEGF, VISTA, Vstm3, or WUCAM. Any and all disclosure herein in relation to targets for antigen binding polypeptides of the invention is generally applicable, and applies equally and without reservation to each and every antigen binding polypeptide and antigen binding polypeptide complex described herein. For the avoidance of doubt, the VL1, VL2, VH1, and/or VH2 of each and every antigen binding polypeptide and antigen binding polypeptide complex described herein may independently bind to any one of said particularly preferred targets.

[0157] In another aspect, the antigen binding polypeptide complex comprises a first polypeptide and a second polypeptide; wherein the first polypeptide has a structure represented by: VL1-VL2-VH2-VH1; VH1-VH2-VL2-VL1; VL1-L1-VL2-L2-VH2-L3-VH1; or VH1-L1-VH2-L2-VL2-L3-VL1; wherein the second polypeptide has a structure represented by VL1-VL2-VH2-VH1; VH1-VH2-VL2-VL1; VL1-L1-VL2-L2-VH2-L3-VH1; or VH1-L1-VH2-L2-VL2-L3-VL1; wherein VL1 is a first immunoglobulin light chain variable region that specifically binds to A2AR, APRIL, ATPDase, BAFF, BAFFR, BCMA, BlyS, BTK, BTLA, B7DC, B7H1, B7H2, B7H3, B7H4, B7H5, B7H6, B7H7, B7RP1, B7-4, C3, C5, CCL2, CCL3, CCL4, CCL5, CCL7, CCL8, CCL11, CCL15, CCL17, CCL19, CCL20, CCL21, CCL25 CCR3, CCR4, CD3, CD16A, CD19, CD20, CD24, CD27, CD28, CD30, CD38, CD39, CD40, CD40L, CD47, CD52, CD70, CD80, CD86, CD123, CD133, CD137, CD137L, CD160, CD272, CEACAM5, CLEC9, CLEC91, CRTH2, CSF-1, CSF-2, CSF-3, CXCL1, CXCL2, CXCL4, CXCL12, CXCL13, CXCR3, cMet, CTLA4, DLL3, DLL4, DNGR-1, E-cadherin, EGFR, ENTPD1, EpCAM, FCER1, FCER1A, FCER2, FGFR, FLAP, FOLH1, Gi24, GITR, GITRL, GPR5, GP100, GPRC5D, HER2, HER3, ICOSL, ICOS, HHLA2, HMGB1, HVEM, IDO, IFNa, IgE, IGF1R, IL2Rbeta, IL1, ILIA, IL1B, IL1F10, IL2, IL4, IL4Ra, IL5, IL5R, IL6, IL7, IL7Ra, IL8, IL9, IL9R, IL10, rhIL1O, IL12, IL13, IL13Ra1, IL13Ra2, IL15, IL17, IL17Rb, IL18, IL22, IL23, IL25, IL7, IL33, IL35, ITGB4, ITK, KIR, LAG3, LAMP1, leptin, LPFS2, MHC class II, MUC-1, MUC-16, NCR3LG1, NKG2D, NKp46, NTPDase-1, OX40, OX40L, PD-1, PD-L1, PD-L2, PROM1, S152, SIRPalpha, SISP1, SLC, SPG64, ST2, STEAP1, STEAP2, Syk kinase, STEAP1, TROP2, TACI, TDO, TGFBETA, T14, TIGIT, TIM3, TLR, TLR2, TLR4, TLR5, TLR9, TMEF1, TNFa, TNFRSF7, Tp55, TREM1, TSLP, TSLPR, TWEAK, VEGF, VISTA, Vstm3, or WUCAM; VL2 is a second immunoglobulin light chain variable region that specifically binds to A2AR, APRIL, ATPDase, BAFF, BAFFR, BCMA, BlyS, BTK, BTLA, B7DC, B7H1, B7H2, B7H3, B7H4, B7H5, B7H6, B7H7, B7RP1, B7-4, C3, C5, CCL2, CCL3, CCL4, CCL5, CCL7, CCL8, CCL11, CCL15, CCL17, CCL19, CCL20, CCL21, CCL25 CCR3, CCR4, CD3, CD16A, CD19, CD20, CD24, CD27, CD28, CD30, CD38, CD39, CD40, CD40L, CD47, CD52, CD70, CD80, CD86, CD123, CD133, CD137, CD137L, CD160, CD272, CEACAM5, CLEC9, CLEC91, CRTH2, CSF-1, CSF-2, CSF-3, CXCL1, CXCL2, CXCL4, CXCL12, CXCL13, CXCR3, cMet, CTLA4, DLL3, DLL4, DNGR-1, E-cadherin, EGFR, ENTPD1, EpCAM, FCER1, FCER1A, FCER2, FGFR, FLAP, FOLH1, Gi24, GITR, GITRL, GPR5, GP100, GPRC5D, HER2, HER3, ICOSL, ICOS, HHLA2, HMGB1, HVEM, IDO, IFNa, IgE, IGF1R, IL2Rbeta, IL1, ILIA, IL1B, IL1F10, IL2, IL4, IL4Ra, IL5, IL5R, IL6, IL7, IL7Ra, IL8, IL9, IL9R, IL10, rhIL1O, IL12, IL13, IL13Ra1, IL13Ra2, IL15, IL17, IL17Rb, IL18, IL22, IL23, IL25, IL7, IL33, IL35, ITGB4, ITK, KIR, LAG3, LAMP1, leptin, LPFS2, MHC class II, MUC-1, MUC-16, NCR3LG1, NKG2D, NKp46, NTPDase-1, OX40, OX40L, PD-1, PD-L1, PD-L2, PROM1, S152, SIRPalpha, SISP1, SLC, SPG64, ST2, STEAP1, STEAP2, Syk kinase, STEAP1, TROP2, TACI, TDO, TGFBETA, T14, TIGIT, TIM3, TLR, TLR2, TLR4, TLR5, TLR9, TMEF1, TNFa, TNFRSF7, Tp55, TREM1, TSLP, TSLPR, TWEAK, VEGF, VISTA, Vstm3, or WUCAM; VH1 is a first immunoglobulin heavy chain variable region that specifically binds to A2AR, APRIL, ATPDase, BAFF, BAFFR, BCMA, BlyS, BTK, BTLA, B7DC, B7H1, B7H2, B7H3, B7H4, B7H5, B7H6, B7H7, B7RP1, B7-4, C3, C5, CCL2, CCL3, CCL4, CCL5, CCL7, CCL8, CCL11, CCL15, CCL17, CCL19, CCL20, CCL21, CCL25 CCR3, CCR4, CD3, CD16A, CD19, CD20, CD24, CD27, CD28, CD30, CD38, CD39, CD40, CD40L, CD47, CD52, CD70, CD80, CD86, CD123, CD133, CD137, CD137L, CD160, CD272, CEACAM5, CLEC9, CLEC91, CRTH2, CSF-1, CSF-2, CSF-3, CXCL1, CXCL2, CXCL4, CXCL12, CXCL13, CXCR3, cMet, CTLA4, DLL3, DLL4, DNGR-1, E-cadherin, EGFR, ENTPD1, EpCAM, FCER1, FCER1A, FCER2, FGFR, FLAP, FOLH1, Gi24, GITR, GITRL, GPR5, GP100, GPRC5D, HER2, HER3, ICOSL, ICOS, HHLA2, HMGB1, HVEM, IDO, IFNa, IgE, IGF1R, IL2Rbeta, IL1, ILIA, IL1B, IL1F10, IL2, IL4, IL4Ra, IL5, IL5R, IL6, IL7, IL7Ra, IL8, IL9, IL9R, IL10, rhIL1O, IL12, IL13, IL13Ra1, IL13Ra2, IL15, IL17, IL17Rb, IL18, IL22, IL23, IL25, IL7, IL33, IL35, ITGB4, ITK, KIR, LAG3, LAMP1, leptin, LPFS2, MHC class II, MUC-1, MUC-16, NCR3LG1, NKG2D, NKp46, NTPDase-1, OX40, OX40L, PD-1, PD-L1, PD-L2, PROM1, S152, SIRPalpha, SISP1, SLC, SPG64, ST2, STEAP1, STEAP2, Syk kinase, STEAP1, TROP2, TACI, TDO, TGFBETA, T14, TIGIT, TIM3, TLR, TLR2, TLR4, TLR5, TLR9, TMEF1, TNFa, TNFRSF7, Tp55, TREM1, TSLP, TSLPR, TWEAK, VEGF, VISTA, Vstm3, or WUCAM; VH2 is a second immunoglobulin heavy chain variable region that specifically binds to A2AR, APRIL, ATPDase, BAFF, BAFFR, BCMA, BlyS, BTK, BTLA, B7DC, B7H1, B7H2, B7H3, B7H4, B7H5, B7H6, B7H7, B7RP1, B7-4, C3, C5, CCL2, CCL3, CCL4, CCL5, CCL7, CCL8, CCL11, CCL15, CCL17, CCL19, CCL20, CCL21, CCL25 CCR3, CCR4, CD3, CD16A, CD19, CD20, CD24, CD27, CD28, CD30, CD38, CD39, CD40, CD40L, CD47, CD52, CD70, CD80, CD86, CD123, CD133, CD137, CD137L, CD160, CD272, CEACAM5, CLEC9, CLEC91, CRTH2, CSF-1, CSF-2, CSF-3, CXCL1, CXCL2, CXCL4, CXCL12, CXCL13, CXCR3, cMet, CTLA4, DLL3, DLL4, DNGR-1, E-cadherin, EGFR, ENTPD1, EpCAM, FCER1, FCER1A, FCER2, FGFR, FLAP, FOLH1, Gi24, GITR, GITRL, GPR5, GP100, GPRC5D, HER2, HER3, ICOSL, ICOS, HHLA2, HMGB1, HVEM, IDO, IFNa, IgE, IGF1R, IL2Rbeta, IL1, ILIA, IL1B, IL1F10, IL2, IL4, IL4Ra, IL5, IL5R, IL6, IL7, IL7Ra, IL8, IL9, IL9R, IL10, rhIL1O, IL12, IL13, IL13Ra1, IL13Ra2, IL15, IL17, IL17Rb, IL18, IL22, IL23, IL25, IL7, IL33, IL35, ITGB4, ITK, KIR, LAG3, LAMP1, leptin, LPFS2, MHC class II, MUC-1, MUC-16, NCR3LG1, NKG2D, NKp46, NTPDase-1, OX40, OX40L, PD-1, PD-L1, PD-L2, PROM1, S152, SIRPalpha, SISP1, SLC, SPG64, ST2, STEAP1, STEAP2, Syk kinase, STEAP1, TROP2, TACI, TDO, TGFBETA, T14, TIGIT, TIM3, TLR, TLR2, TLR4, TLR5, TLR9, TMEF1, TNFa, TNFRSF7, Tp55, TREM1, TSLP, TSLPR, TWEAK, VEGF, VISTA, Vstm3, or WUCAM; and L1, L2 and L3 are amino acid linkers. In some aspects, the first polypeptide has the structure VL1-VL2-VH2-VH1 and the second polypeptide has the structure VL1-VL2-VH2-VH1, and the VL1, VL2, VH1 and/or VH2 specifically binds to A2AR, APRIL, ATPDase, BAFF, BAFFR, BCMA, BlyS, BTK, BTLA, B7DC, B7H1, B7H2, B7H3, B7H4, B7H5, B7H6, B7H7, B7RP1, B7-4, C3, C5, CCL2, CCL3, CCL4, CCLS, CCL7, CCL8, CCL11, CCL15, CCL17, CCL19, CCL20, CCL21, CCL25 CCR3, CCR4, CD3, CD16A, CD19, CD20, CD24, CD27, CD28, CD30, CD38, CD39, CD40, CD40L, CD47, CD52, CD70, CD80, CD86, CD123, CD133, CD137, CD137L, CD160, CD272, CEACAM5, CLEC9, CLEC91, CRTH2, CSF-1, CSF-2, CSF-3, CXCL1, CXCL2, CXCL4, CXCL12, CXCL13, CXCR3, cMet, CTLA4, DLL3, DLL4, DNGR-1, E-cadherin, EGFR, ENTPD1, EpCAM, FCER1, FCER1A, FCER2, FGFR, FLAP, FOLH1, Gi24, GITR, GITRL, GPR5, GP100, GPRC5D, HER2, HER3, ICOSL, ICOS, HHLA2, HMGB1, HVEM, IDO, IFNa, IgE, IGF1R, IL2Rbeta, IL1, ILIA, IL1B, IL1F10, IL2, IL4, IL4Ra, IL5, IL5R, IL6, IL7, IL7Ra, IL8, IL9, IL9R, IL10, rhIL1O, IL12, IL13, IL13Ra1, IL13Ra2, IL15, IL17, IL17Rb, IL18, IL22, IL23, IL25, IL7, IL33, IL35, ITGB4, ITK, KIR, LAG3, LAMP1, leptin, LPFS2, MHC class II, MUC-1, MUC-16, NCR3LG1, NKG2D, NKp46, NTPDase-1, OX40, OX40L, PD-1, PD-L1, PD-L2, PROM1, S152, SIRPalpha, SISP1, SLC, SPG64, ST2, STEAP1, STEAP2, Syk kinase, STEAP1, TROP2, TACI, TDO, TGFBETA, T14, TIGIT, TIM3, TLR, TLR2, TLR4, TLR5, TLR9, TMEF1, TNFa, TNFRSF7, Tp55, TREM1, TSLP, TSLPR, TWEAK, VEGF, VISTA, Vstm3, or WUCAM. In some aspects, the first polypeptide has the structure VH1-VH2-VL2-VL1 and the second polypeptide has the structure VH1-VH2-VL2-VL1, and the VL1, VL2, VH1 and/or VH2 specifically binds to A2AR, APRIL, ATPDase, BAFF, BAFFR, BCMA, BlyS, BTK, BTLA, B7DC, B7H1, B7H2, B7H3, B7H4, B7H5, B7H6, B7H7, B7RP1, B7-4, C3, C5, CCL2, CCL3, CCL4, CCLS, CCL7, CCL8, CCL11, CCL15, CCL17, CCL19, CCL20, CCL21, CCL25 CCR3, CCR4, CD3, CD16A, CD19, CD20, CD24, CD27, CD28, CD30, CD38, CD39, CD40, CD40L, CD47, CD52, CD70, CD80, CD86, CD123, CD133, CD137, CD137L, CD160, CD272, CEACAM5, CLEC9, CLEC91, CRTH2, CSF-1, CSF-2, CSF-3, CXCL1, CXCL2, CXCL4, CXCL12, CXCL13, CXCR3, cMet, CTLA4, DLL3, DLL4, DNGR-1, E-cadherin, EGFR, ENTPD1, EpCAM, FCER1, FCER1A, FCER2, FGFR, FLAP, FOLH1, Gi24, GITR, GITRL, GPR5, GP100, GPRC5D, HER2, HER3, ICOSL, ICOS, HHLA2, HMGB1, HVEM, IDO, IFNa, IgE, IGF1R, IL2Rbeta, IL1, ILIA, IL1B, IL1F10, IL2, IL4, IL4Ra, IL5, IL5R, IL6, IL7, IL7Ra, IL8, IL9, IL9R, IL10, rhIL1O, IL12, IL13, IL13Ra1, IL13Ra2, IL15, IL17, IL17Rb, IL18, IL22, IL23, IL25, IL7, IL33, IL35, ITGB4, ITK, KIR, LAG3, LAMP1, leptin, LPFS2, MHC class II, MUC-1, MUC-16, NCR3LG1, NKG2D, NKp46, NTPDase-1, OX40, OX40L, PD-1, PD-L1, PD-L2, PROM1, S152, SIRPalpha, SISP1, SLC, SPG64, ST2, STEAP1, STEAP2, Syk kinase, STEAP1, TROP2, TACI, TDO, TGFBETA, T14, TIGIT, TIM3, TLR, TLR2, TLR4, TLR5, TLR9, TMEF1, TNFa, TNFRSF7, Tp55, TREM1, TSLP, TSLPR, TWEAK, VEGF, VISTA, Vstm3, or WUCAM. In some aspects, the first polypeptide has the structure VH1-VH2-VL2-VL1 and the second polypeptide has the structure VL1-VL2-VH2-VH1, and the VL1, VL2, VH1 and/or VH2 specifically binds to A2AR, APRIL, ATPDase, BAFF, BAFFR, BCMA, BlyS, BTK, BTLA, B7DC, B7H1, B7H2, B7H3, B7H4, B7H5, B7H6, B7H7, B7RP1, B7-4, C3, C5, CCL2, CCL3, CCL4, CCL5, CCL7, CCL8, CCL11, CCL15, CCL17, CCL19, CCL20, CCL21, CCL25 CCR3, CCR4, CD3, CD16A, CD19, CD20, CD24, CD27, CD28, CD30, CD38, CD39, CD40, CD40L, CD47, CD52, CD70, CD80, CD86, CD123, CD133, CD137, CD137L, CD160, CD272, CEACAM5, CLEC9, CLEC91, CRTH2, CSF-1, CSF-2, CSF-3, CXCL1, CXCL2, CXCL4, CXCL12, CXCL13, CXCR3, cMet, CTLA4, DLL3, DLL4, DNGR-1, E-cadherin, EGFR, ENTPD1, EpCAM, FCER1, FCER1A, FCER2, FGFR, FLAP, FOLH1, Gi24, GITR, GITRL, GPR5, GP100, GPRC5D, HER2, HER3, ICOSL, ICOS, HHLA2, HMGB1, HVEM, IDO, IFNa, IgE, IGF1R, IL2Rbeta, IL1, ILIA, IL1B, IL1F10, IL2, IL4, IL4Ra, IL5, IL5R, IL6, IL7, IL7Ra, IL8, IL9, IL9R, IL10, rhIL1O, IL12, IL13, IL13Ra1, IL13Ra2, IL15, IL17, IL17Rb, IL18, IL22, IL23, IL25, IL7, IL33, IL35, ITGB4, ITK, KIR, LAG3, LAMP1, leptin, LPFS2, MHC class II, MUC-1, MUC-16, NCR3LG1, NKG2D, NKp46, NTPDase-1, OX40, OX40L, PD-1, PD-L1, PD-L2, PROM1, S152, SIRPalpha, SISP1, SLC, SPG64, ST2, STEAP1, STEAP2, Syk kinase, STEAP1, TROP2, TACI, TDO, TGFBETA, T14, TIGIT, TIM3, TLR, TLR2, TLR4, TLR5, TLR9, TMEF1, TNFa, TNFRSF7, Tp55, TREM1, TSLP, TSLPR, TWEAK, VEGF, VISTA, Vstm3, or WUCAM. In some aspects, the first polypeptide has the structure VL1-VL2-VH2-VH1 and the second polypeptide has the structure VH1-VH2-VL2-VL1, and the VL1, VL2, VH1 and/or VH2 specifically binds to A2AR, APRIL, ATPDase, BAFF, BAFFR, BCMA, BlyS, BTK, BTLA, B7DC, B7H1, B7H2, B7H3, B7H4, B7H5, B7H6, B7H7, B7RP1, B7-4, C3, C5, CCL2, CCL3, CCL4, CCL5, CCL7, CCL8, CCL11, CCL15, CCL17, CCL19, CCL20, CCL21, CCL25 CCR3, CCR4, CD3, CD16A, CD19, CD20, CD24, CD27, CD28, CD30, CD38, CD39, CD40, CD40L, CD47, CD52, CD70, CD80, CD86, CD123, CD133, CD137, CD137L, CD160, CD272, CEACAM5, CLEC9, CLEC91, CRTH2, CSF-1, CSF-2, CSF-3, CXCL1, CXCL2, CXCL4, CXCL12, CXCL13, CXCR3, cMet, CTLA4, DLL3, DLL4, DNGR-1, E-cadherin, EGFR, ENTPD1, EpCAM, FCER1, FCER1A, FCER2, FGFR, FLAP, FOLH1, Gi24, GITR, GITRL, GPR5, GP100, GPRC5D, HER2, HER3, ICOSL, ICOS, HHLA2, HMGB1, HVEM, IDO, IFNa, IgE, IGF1R, IL2Rbeta, IL1, ILIA, IL1B, IL1F10, IL2, IL4, IL4Ra, IL5, IL5R, IL6, IL7, IL7Ra, IL8, IL9, IL9R, IL10, rhIL1O, IL12, IL13, IL13Ra1, IL13Ra2, IL15, IL17, IL17Rb, IL18, IL22, IL23, IL25, IL7, IL33, IL35, ITGB4, ITK, KIR, LAG3, LAMP1, leptin, LPFS2, MHC class II, MUC-1, MUC-16, NCR3LG1, NKG2D, NKp46, NTPDase-1, OX40, OX40L, PD-1, PD-L1, PD-L2, PROM1, S152, SIRPalpha, SISP1, SLC, SPG64, ST2, STEAP1, STEAP2, Syk kinase, STEAP1, TROP2, TACI, TDO, TGFBETA, T14, TIGIT, TIM3, TLR, TLR2, TLR4, TLR5, TLR9, TMEF1, TNFa, TNFRSF7, Tp55, TREM1, TSLP, TSLPR, TWEAK, VEGF, VISTA, Vstm3, or WUCAM. In the above aspects of the invention, the VL1, VL2, VH1 and VH2 may be linked by one or more amino acid linker e.g. to form the structure VL1-L1-VL2-L2-VH2-L3-VH1 or VH1-L1-VH2-L2-VL2-L3-VL1. Any and all disclosure herein in relation to targets for antigen binding polypeptides of the invention is generally applicable, and applies equally and without reservation to each and every antigen binding polypeptide and antigen binding polypeptide complex described herein. For the avoidance of doubt, the VL1, VL2, VH1, and/or VH2 of each and every antigen binding polypeptide and antigen binding polypeptide complex described herein may independently bind to any one of said particularly preferred targets.

[0158] In some aspects, the antigen binding polypeptide has a structure represented by VL1-VL2-VH2-VH1-Fc; VH1-VH2-VL2-VL1-Fc; VL1-L1-VL2-L2-VH2-L3-VH1-Fc; VH1-L1-VH2-L2-VL2-L3-VL1-Fc; VL1-L1-VL2-L2-VH2-L3-VH1-L4-Fc; or VH1-L1-VH2-L2-VL2-L3-VL1-L4-Fc; wherein VL1 is a first immunoglobulin light chain variable region that specifically binds to A2AR, APRIL, ATPDase, BAFF, BAFFR, BCMA, BlyS, BTK, BTLA, B7DC, B7H1, B7H2, B7H3, B7H4, B7H5, B7H6, B7H7, B7RP1, B7-4, C3, C5, CCL2, CCL3, CCL4, CCL5, CCL7, CCL8, CCL11, CCL15, CCL17, CCL19, CCL20, CCL21, CCL25 CCR3, CCR4, CD3, CD16A, CD19, CD20, CD24, CD27, CD28, CD30, CD38, CD39, CD40, CD40L, CD47, CD52, CD70, CD80, CD86, CD123, CD133, CD137, CD137L, CD160, CD272, CEACAM5, CLEC9, CLEC91, CRTH2, CSF-1, CSF-2, CSF-3, CXCL1, CXCL2, CXCL4, CXCL12, CXCL13, CXCR3, cMet, CTLA4, DLL3, DLL4, DNGR-1, E-cadherin, EGFR, ENTPD1, EpCAM, FCER1, FCER1A, FCER2, FGFR, FLAP, FOLH1, Gi24, GITR, GITRL, GPR5, GP100, GPRC5D, HER2, HER3, ICOSL, ICOS, HHLA2, HMGB1, HVEM, IDO, IFNa, IgE, IGF1R, IL2Rbeta, IL1, ILIA, IL1B, IL1F10, IL2, IL4, IL4Ra, IL5, IL5R, IL6, IL7, IL7Ra, IL8, IL9, IL9R, IL10, rhIL1O, IL12, IL13, IL13Ra1, IL13Ra2, IL15, IL17, IL17Rb, IL18, IL22, IL23, IL25, IL7, IL33, IL35, ITGB4, ITK, KIR, LAG3, LAMP1, leptin, LPFS2, MHC class II, MUC-1, MUC-16, NCR3LG1, NKG2D, NKp46, NTPDase-1, OX40, OX40L, PD-1, PD-L1, PD-L2, PROM1, S152, SIRPalpha, SISP1, SLC, SPG64, ST2, STEAP1, STEAP2, Syk kinase, STEAP1, TROP2, TACI, TDO, TGFBETA, T14, TIGIT, TIM3, TLR, TLR2, TLR4, TLR5, TLR9, TMEF1, TNFa, TNFRSF7, Tp55, TREM1, TSLP, TSLPR, TWEAK, VEGF, VISTA, Vstm3, or WUCAM; VL2 is a second immunoglobulin light chain variable region that specifically binds to A2AR, APRIL, ATPDase, BAFF, BAFFR, BCMA, BlyS, BTK, BTLA, B7DC, B7H1, B7H2, B7H3, B7H4, B7H5, B7H6, B7H7, B7RP1, B7-4, C3, C5, CCL2, CCL3, CCL4, CCL5, CCL7, CCL8, CCL11, CCL15, CCL17, CCL19, CCL20, CCL21, CCL25 CCR3, CCR4, CD3, CD16A, CD19, CD20, CD24, CD27, CD28, CD30, CD38, CD39, CD40, CD40L, CD47, CD52, CD70, CD80, CD86, CD123, CD133, CD137, CD137L, CD160, CD272, CEACAM5, CLEC9, CLEC91, CRTH2, CSF-1, CSF-2, CSF-3, CXCL1, CXCL2, CXCL4, CXCL12, CXCL13, CXCR3, cMet, CTLA4, DLL3, DLL4, DNGR-1, E-cadherin, EGFR, ENTPD1, EpCAM, FCER1, FCER1A, FCER2, FGFR, FLAP, FOLH1, Gi24, GITR, GITRL, GPR5, GP100, GPRC5D, HER2, HER3, ICOSL, ICOS, HHLA2, HMGB1, HVEM, IDO, IFNa, IgE, IGF1R, IL2Rbeta, IL1, ILIA, IL1B, IL1F10, IL2, IL4, IL4Ra, IL5, IL5R, IL6, IL7, IL7Ra, IL8, IL9, IL9R, IL10, rhIL1O, IL12, IL13, IL13Ra1, IL13Ra2, IL15, IL17, IL17Rb, IL18, IL22, IL23, IL25, IL7, IL33, IL35, ITGB4, ITK, KIR, LAG3, LAMP1, leptin, LPFS2, MHC class II, MUC-1, MUC-16, NCR3LG1, NKG2D, NKp46, NTPDase-1, OX40, OX40L, PD-1, PD-L1, PD-L2, PROM1, S152, SIRPalpha, SISP1, SLC, SPG64, ST2, STEAP1, STEAP2, Syk kinase, STEAP1, TROP2, TACI, TDO, TGFBETA, T14, TIGIT, TIM3, TLR, TLR2, TLR4, TLR5, TLR9, TMEF1, TNFa, TNFRSF7, Tp55, TREM1, TSLP, TSLPR, TWEAK, VEGF, VISTA, Vstm3, or WUCAM; VH1 is a first immunoglobulin heavy chain variable region that specifically binds to A2AR, APRIL, ATPDase, BAFF, BAFFR, BCMA, BlyS, BTK, BTLA, B7DC, B7H1, B7H2, B7H3, B7H4, B7H5, B7H6, B7H7, B7RP1, B7-4, C3, C5, CCL2, CCL3, CCL4, CCL5, CCL7, CCL8, CCL11, CCL15, CCL17, CCL19, CCL20, CCL21, CCL25 CCR3, CCR4, CD3, CD16A, CD19, CD20, CD24, CD27, CD28, CD30, CD38, CD39, CD40, CD40L, CD47, CD52, CD70, CD80, CD86, CD123, CD133, CD137, CD137L, CD160, CD272, CEACAM5, CLEC9, CLEC91, CRTH2, CSF-1, CSF-2, CSF-3, CXCL1, CXCL2, CXCL4, CXCL12, CXCL13, CXCR3, cMet, CTLA4, DLL3, DLL4, DNGR-1, E-cadherin, EGFR, ENTPD1, EpCAM, FCER1, FCER1A, FCER2, FGFR, FLAP, FOLH1, Gi24, GITR, GITRL, GPR5, GP100, GPRC5D, HER2, HER3, ICOSL, ICOS, HHLA2, HMGB1, HVEM, IDO, IFNa, IgE, IGF1R, IL2Rbeta, IL1, ILIA, IL1B, IL1F10, IL2, IL4, IL4Ra, IL5, IL5R, IL6, IL7, IL7Ra, IL8, IL9, IL9R, IL10, rhIL1O, IL12, IL13, IL13Ra1, IL13Ra2, IL15, IL17, IL17Rb, IL18, IL22, IL23, IL25, IL7, IL33, IL35, ITGB4, ITK, KIR, LAG3, LAMP1, leptin, LPFS2, MHC class II, MUC-1, MUC-16, NCR3LG1, NKG2D, NKp46, NTPDase-1, OX40, OX40L, PD-1, PD-L1, PD-L2, PROM1, S152, SIRPalpha, SISP1, SLC, SPG64, ST2, STEAP1, STEAP2, Syk kinase, STEAP1, TROP2, TACI, TDO, TGFBETA, T14, TIGIT, TIM3, TLR, TLR2, TLR4, TLR5, TLR9, TMEF1, TNFa, TNFRSF7, Tp55, TREM1, TSLP, TSLPR, TWEAK, VEGF, VISTA, Vstm3, or WUCAM; VH2 is a second immunoglobulin heavy chain variable region that specifically binds to A2AR, APRIL, ATPDase, BAFF, BAFFR, BCMA, BlyS, BTK, BTLA, B7DC, B7H1, B7H2, B7H3, B7H4, B7H5, B7H6, B7H7, B7RP1, B7-4, C3, C5, CCL2, CCL3, CCL4, CCL5, CCL7, CCL8, CCL11, CCL15, CCL17, CCL19, CCL20, CCL21, CCL25 CCR3, CCR4, CD3, CD16A, CD19, CD20, CD24, CD27, CD28, CD30, CD38, CD39, CD40, CD40L, CD47, CD52, CD70, CD80, CD86, CD123, CD133, CD137, CD137L, CD160, CD272, CEACAM5, CLEC9, CLEC91, CRTH2, CSF-1, CSF-2, CSF-3, CXCL1, CXCL2, CXCL4, CXCL12, CXCL13, CXCR3, cMet, CTLA4, DLL3, DLL4, DNGR-1, E-cadherin, EGFR, ENTPD1, EpCAM, FCER1, FCER1A, FCER2, FGFR, FLAP, FOLH1, Gi24, GITR, GITRL, GPR5, GP100, GPRC5D, HER2, HER3, ICOSL, ICOS, HHLA2, HMGB1, HVEM, IDO, IFNa, IgE, IGF1R, IL2Rbeta, IL1, ILIA, IL1B, IL1F10, IL2, IL4, IL4Ra, IL5, IL5R, IL6, IL7, IL7Ra, IL8, IL9, IL9R, IL10, rhIL1O, IL12, IL13, IL13Ra1, IL13Ra2, IL15, IL17, IL17Rb, IL18, IL22, IL23, IL25, IL7, IL33, IL35, ITGB4, ITK, KIR, LAG3, LAMP1, leptin, LPFS2, MHC class II, MUC-1, MUC-16, NCR3LG1, NKG2D, NKp46, NTPDase-1, OX40, OX40L, PD-1, PD-L1, PD-L2, PROM1, S152, SIRPalpha, SISP1, SLC, SPG64, ST2, STEAP1, STEAP2, Syk kinase, STEAP1, TROP2, TACI, TDO, TGFBETA, T14, TIGIT, TIM3, TLR, TLR2, TLR4, TLR5, TLR9, TMEF1, TNFa, TNFRSF7, Tp55, TREM1, TSLP, TSLPR, TWEAK, VEGF, VISTA, Vstm3, or WUCAM; Fc is a region comprising an immunoglobulin heavy chain constant region 2 (CH2), an immunoglobulin heavy chain constant region 3 (CH3), and optionally, an immunoglobulin hinge; and L1, L2, L3 and L4 are amino acid linkers. In some aspects, the antigen binding polypeptide has the structure represented by VL1-VL2-VH2-VH1-Fc, wherein VL1, VL2, VH1 and/or VH2 specifically binds to A2AR, APRIL, ATPDase, BAFF, BAFFR, BCMA, BlyS, BTK, BTLA, B7DC, B7H1, B7H2, B7H3, B7H4, B7H5, B7H6, B7H7, B7RP1, B7-4, C3, C5, CCL2, CCL3, CCL4, CCL5, CCL7, CCL8, CCL11, CCL15, CCL17, CCL19, CCL20, CCL21, CCL25 CCR3, CCR4, CD3, CD16A, CD19, CD20, CD24, CD27, CD28, CD30, CD38, CD39, CD40, CD40L, CD47, CD52, CD70, CD80, CD86, CD123, CD133, CD137, CD137L, CD160, CD272, CEACAM5, CLEC9, CLEC91, CRTH2, CSF-1, CSF-2, CSF-3, CXCL1, CXCL2, CXCL4, CXCL12, CXCL13, CXCR3, cMet, CTLA4, DLL3, DLL4, DNGR-1, E-cadherin, EGFR, ENTPD1, EpCAM, FCER1, FCER1A, FCER2, FGFR, FLAP, FOLH1, Gi24, GITR, GITRL, GPR5, GP100, GPRC5D, HER2, HER3, ICOSL, ICOS, HHLA2, HMGB1, HVEM, IDO, IFNa, IgE, IGF1R, IL2Rbeta, IL1, ILIA, IL1B, IL1F10, IL2, IL4, IL4Ra, IL5, IL5R, IL6, IL7, IL7Ra, IL8, IL9, IL9R, IL10, rhIL1O, IL12, IL13, IL13Ra1, IL13Ra2, IL15, IL17, IL17Rb, IL18, IL22, IL23, IL25, IL7, IL33, IL35, ITGB4, ITK, KIR, LAG3, LAMP1, leptin, LPFS2, MHC class II, MUC-1, MUC-16, NCR3LG1, NKG2D, NKp46, NTPDase-1, OX40, OX40L, PD-1, PD-L1, PD-L2, PROM1, S152, SIRPalpha, SISP1, SLC, SPG64, ST2, STEAP1, STEAP2, Syk kinase, STEAP1, TROP2, TACI, TDO, TGFBETA, T14, TIGIT, TIM3, TLR, TLR2, TLR4, TLR5, TLR9, TMEF1, TNFa, TNFRSF7, Tp55, TREM1, TSLP, TSLPR, TWEAK, VEGF, VISTA, Vstm3, or WUCAM. In some aspects, the antigen binding polypeptide has the structure represented by VH1-VH2-VL2-VL1-Fc, wherein VL1, VL2, VH1 and/or VH2 specifically binds to A2AR, APRIL, ATPDase, BAFF, BAFFR, BCMA, BlyS, BTK, BTLA, B7DC, B7H1, B7H2, B7H3, B7H4, B7H5, B7H6, B7H7, B7RP1, B7-4, C3, C5, CCL2, CCL3, CCL4, CCL5, CCL7, CCL8, CCL11, CCL15, CCL17, CCL19, CCL20, CCL21, CCL25 CCR3, CCR4, CD3, CD16A, CD19, CD20, CD24, CD27, CD28, CD30, CD38, CD39, CD40, CD40L, CD47, CD52, CD70, CD80, CD86, CD123, CD133, CD137, CD137L, CD160, CD272, CEACAM5, CLEC9, CLEC91, CRTH2, CSF-1, CSF-2, CSF-3, CXCL1, CXCL2, CXCL4, CXCL12, CXCL13, CXCR3, cMet, CTLA4, DLL3, DLL4, DNGR-1, E-cadherin, EGFR, ENTPD1, EpCAM, FCER1, FCER1A, FCER2, FGFR, FLAP, FOLH1, Gi24, GITR, GITRL, GPR5, GP100, GPRC5D, HER2, HER3, ICOSL, ICOS, HHLA2, HMGB1, HVEM, IDO, IFNa, IgE, IGF1R, IL2Rbeta, IL1, ILIA, IL1B, IL1F10, IL2, IL4, IL4Ra, IL5, IL5R, IL6, IL7, IL7Ra, IL8, IL9, IL9R, IL10, rhIL1O, IL12, IL13, IL13Ra1, IL13Ra2, IL15, IL17, IL17Rb, IL18, IL22, IL23, IL25, IL7, IL33, IL35, ITGB4, ITK, KIR, LAG3, LAMP1, leptin, LPFS2, MHC class II, MUC-1, MUC-16, NCR3LG1, NKG2D, NKp46, NTPDase-1, OX40, OX40L, PD-1, PD-L1, PD-L2, PROM1, S152, SIRPalpha, SISP1, SLC, SPG64, ST2, STEAP1, STEAP2, Syk kinase, STEAP1, TROP2, TACI, TDO, TGFBETA, T14, TIGIT, TIM3, TLR, TLR2, TLR4, TLR5, TLR9, TMEF1, TNFa, TNFRSF7, Tp55, TREM1, TSLP, TSLPR, TWEAK, VEGF, VISTA, Vstm3, or WUCAM. In some aspects, the antigen binding polypeptide has the structure represented by VIA-L1-VL2-L2-VH2-L3-VH1-Fc, wherein VL1, VL2, VH1 and/or VH2 specifically binds to A2AR, APRIL, ATPDase, BAFF, BAFFR, BCMA, BlyS, BTK, BTLA, B7DC, B7H1, B7H2, B7H3, B7H4, B7H5, B7H6, B7H7, B7RP1, B7-4, C3, C5, CCL2, CCL3, CCL4, CCL5, CCL7, CCL8, CCL11, CCL15, CCL17, CCL19, CCL20, CCL21, CCL25 CCR3, CCR4, CD3, CD16A, CD19, CD20, CD24, CD27, CD28, CD30, CD38, CD39, CD40, CD40L, CD47, CD52, CD70, CD80, CD86, CD123, CD133, CD137, CD137L, CD160, CD272, CEACAM5, CLEC9, CLEC91, CRTH2, CSF-1, CSF-2, CSF-3, CXCL1, CXCL2, CXCL4, CXCL12, CXCL13, CXCR3, cMet, CTLA4, DLL3, DLL4, DNGR-1, E-cadherin, EGFR, ENTPD1, EpCAM, FCER1, FCER1A, FCER2, FGFR, FLAP, FOLH1, Gi24, GITR, GITRL, GPR5, GP100, GPRC5D, HER2, HER3, ICOSL, ICOS, HHLA2, HMGB1, HVEM, IDO, IFNa, IgE, IGF1R, IL2Rbeta, IL1, ILIA, IL1B, IL1F10, IL2, IL4, IL4Ra, IL5, IL5R, IL6, IL7, IL7Ra, IL8, IL9, IL9R, IL10, rhIL1O, IL12, IL13, IL13Ra1, IL13Ra2, IL15, IL17, IL17Rb, IL18, IL22, IL23, IL25, IL7, IL33, IL35, ITGB4, ITK, KIR, LAG3, LAMP1, leptin, LPFS2, MHC class II, MUC-1, MUC-16, NCR3LG1, NKG2D, NKp46, NTPDase-1, OX40, OX40L, PD-1, PD-L1, PD-L2, PROM1, S152, SIRPalpha, SISP1, SLC, SPG64, ST2, STEAP1, STEAP2, Syk kinase, STEAP1, TROP2, TACI, TDO, TGFBETA, T14, TIGIT, TIM3, TLR, TLR2, TLR4, TLR5, TLR9, TMEF1, TNFa, TNFRSF7, Tp55, TREM1, TSLP, TSLPR, TWEAK, VEGF, VISTA, Vstm3, or WUCAM. In some aspects, the antigen binding polypeptide has the structure represented by VH1-L1-VH2-L2-VL2-L3-VL1-Fc, wherein VL1, VL2, VH1 and/or VH2 specifically binds to A2AR, APRIL, ATPDase, BAFF, BAFFR, BCMA, BlyS, BTK, BTLA, B7DC, B7H1, B7H2, B7H3, B7H4, B7H5, B7H6, B7H7, B7RP1, B7-4, C3, C5, CCL2, CCL3, CCL4, CCL5, CCL7, CCL8, CCL11, CCL15, CCL17, CCL19, CCL20, CCL21, CCL25 CCR3, CCR4, CD3, CD16A, CD19, CD20, CD24, CD27, CD28, CD30, CD38, CD39, CD40, CD40L, CD47, CD52, CD70, CD80, CD86, CD123, CD133, CD137, CD137L, CD160, CD272, CEACAM5, CLEC9, CLEC91, CRTH2, CSF-1, CSF-2, CSF-3, CXCL1, CXCL2, CXCL4, CXCL12, CXCL13, CXCR3, cMet, CTLA4, DLL3, DLL4, DNGR-1, E-cadherin, EGFR, ENTPD1, EpCAM, FCER1, FCER1A, FCER2, FGFR, FLAP, FOLH1, Gi24, GITR, GITRL, GPR5, GP100, GPRC5D, HER2, HER3, ICOSL, ICOS, HHLA2, HMGB1, HVEM, IDO, IFNa, IgE, IGF1R, IL2Rbeta, IL1, ILIA, IL1B, IL1F10, IL2, IL4, IL4Ra, IL5, IL5R, IL6, IL7, IL7Ra, IL8, IL9, IL9R, IL10, rhIL1O, IL12, IL13, IL13Ra1, IL13Ra2, IL15, IL17, IL17Rb, IL18, IL22, IL23, IL25, IL7, IL33, IL35, ITGB4, ITK, KIR, LAG3, LAMP1, leptin, LPFS2, MHC class II, MUC-1, MUC-16, NCR3LG1, NKG2D, NKp46, NTPDase-1, OX40, OX40L, PD-1, PD-L1, PD-L2, PROM1, S152, SIRPalpha, SISP1, SLC, SPG64, ST2, STEAP1, STEAP2, Syk kinase, STEAP1, TROP2, TACI, TDO, TGFBETA, T14, TIGIT, TIM3, TLR, TLR2, TLR4, TLR5, TLR9, TMEF1, TNFa, TNFRSF7, Tp55, TREM1, TSLP, TSLPR, TWEAK, VEGF, VISTA, Vstm3, or WUCAM. In some aspects, the antigen binding polypeptide has the structure represented by VL1-L1-VL2-L2-VH2-L3-VH1-L4-Fc, wherein VL1, VL2, VH1 and/or VH2 specifically binds to A2AR, APRIL, ATPDase, BAFF, BAFFR, BCMA, BlyS, BTK, BTLA, B7DC, B7H1, B7H2, B7H3, B7H4, B7H5, B7H6, B7H7, B7RP1, B7-4, C3, C5, CCL2, CCL3, CCL4, CCL5, CCL7, CCL8, CCL11, CCL15, CCL17, CCL19, CCL20, CCL21, CCL25 CCR3, CCR4, CD3, CD16A, CD19, CD20, CD24, CD27, CD28, CD30, CD38, CD39, CD40, CD40L, CD47, CD52, CD70, CD80, CD86, CD123, CD133, CD137, CD137L, CD160, CD272, CEACAM5, CLEC9, CLEC91, CRTH2, CSF-1, CSF-2, CSF-3, CXCL1, CXCL2, CXCL4, CXCL12, CXCL13, CXCR3, cMet, CTLA4, DLL3, DLL4, DNGR-1, E-cadherin, EGFR, ENTPD1, EpCAM, FCER1, FCER1A, FCER2, FGFR, FLAP, FOLH1, Gi24, GITR, GITRL, GPR5, GP100, GPRC5D, HER2, HER3, ICOSL, ICOS, HHLA2, HMGB1, HVEM, IDO, IFNa, IgE, IGF1R, IL2Rbeta, IL1, ILIA, IL1B, IL1F10, IL2, IL4, IL4Ra, IL5, IL5R, IL6, IL7, IL7Ra, IL8, IL9, IL9R, IL10, rhIL1O, IL12, IL13, IL13Ra1, IL13Ra2, IL15, IL17, IL17Rb, IL18, IL22, IL23, IL25, IL7, IL33, IL35, ITGB4, ITK, KIR, LAG3, LAMP1, leptin, LPFS2, MHC class II, MUC-1, MUC-16, NCR3LG1, NKG2D, NKp46, NTPDase-1, OX40, OX40L, PD-1, PD-L1, PD-L2, PROM1, S152, SIRPalpha, SISP1, SLC, SPG64, ST2, STEAP1, STEAP2, Syk kinase, STEAP1, TROP2, TACI, TDO, TGFBETA, T14, TIGIT, TIM3, TLR, TLR2, TLR4, TLR5, TLR9, TMEF1, TNFa, TNFRSF7, Tp55, TREM1, TSLP, TSLPR, TWEAK, VEGF, VISTA, Vstm3, or WUCAM. In some aspects, the antigen binding polypeptide has the structure represented by VH1-L1-VH2-L2-VL2-L3-VL1-L4-Fc, wherein VL1, VL2, VH1 and/or VH2 specifically binds to A2AR, APRIL, ATPDase, BAFF, BAFFR, BCMA, BlyS, BTK, BTLA, B7DC, B7H1, B7H2, B7H3, B7H4, B7H5, B7H6, B7H7, B7RP1, B7-4, C3, C5, CCL2, CCL3, CCL4, CCL5, CCL7, CCL8, CCL11, CCL15, CCL17, CCL19, CCL20, CCL21, CCL25 CCR3, CCR4, CD3, CD16A, CD19, CD20, CD24, CD27, CD28, CD30, CD38, CD39, CD40, CD40L, CD47, CD52, CD70, CD80, CD86, CD123, CD133, CD137, CD137L, CD160, CD272, CEACAM5, CLEC9, CLEC91, CRTH2, CSF-1, CSF-2, CSF-3, CXCL1, CXCL2, CXCL4, CXCL12, CXCL13, CXCR3, cMet, CTLA4, DLL3, DLL4, DNGR-1, E-cadherin, EGFR, ENTPD1, EpCAM, FCER1, FCER1A, FCER2, FGFR, FLAP, FOLH1, Gi24, GITR, GITRL, GPR5, GP100, GPRC5D, HER2, HER3, ICOSL, ICOS, HHLA2, HMGB1, HVEM, IDO, IFNa, IgE, IGF1R, IL2Rbeta, IL1, ILIA, IL1B, IL1F10, IL2, IL4, IL4Ra, IL5, IL5R, IL6, IL7, IL7Ra, IL8, IL9, IL9R, IL10, rhIL1O, IL12, IL13, IL13Ra1, IL13Ra2, IL15, IL17, IL17Rb, IL18, IL22, IL23, IL25, IL7, IL33, IL35, ITGB4, ITK, KIR, LAG3, LAMP1, leptin, LPFS2, MHC class II, MUC-1, MUC-16, NCR3LG1, NKG2D, NKp46, NTPDase-1, OX40, OX40L, PD-1, PD-L1, PD-L2, PROM1, S152, SIRPalpha, SISP1, SLC, SPG64, ST2, STEAP1, STEAP2, Syk kinase, STEAP1, TROP2, TACI, TDO, TGFBETA, T14, TIGIT, TIM3, TLR, TLR2, TLR4, TLR5, TLR9, TMEF1, TNFa, TNFRSF7, Tp55, TREM1, TSLP, TSLPR, TWEAK, VEGF, VISTA, Vstm3, or WUCAM. Any and all disclosure herein in relation to targets for antigen binding polypeptides of the invention is generally applicable, and applies equally and without reservation to each and every antigen binding polypeptide and antigen binding polypeptide complex described herein. For the avoidance of doubt, the VL1, VL2, VH1, and/or VH2 of each and every antigen binding polypeptide and antigen binding polypeptide complex described herein may independently bind to any one of said particularly preferred targets.

[0159] In some aspects, the antigen binding polypeptide complex comprises a first polypeptide and a second polypeptide, wherein the first polypeptide has a structure represented by VL1-VL2-VH2-VH1-Fc; VH1-VH2-VL2-VL1-Fc; VL1-L1-VL2-L2-VH2-L3-VH1-Fc; VH1-L1-VH2-L2-VL2-L3-VL1-Fc; VL1-L1-VL2-L2-VH2-L3-VH1-L4-Fc; or VH1-L1-VH2-L2-VL2-L3-VL1-L4-Fc; wherein the second polypeptide has a structure represented by Fc; VL1-VL2-VH2-VH1-Fc; VH1-VH2-VL2-VL1-Fc; VL1-L1-VL2-L2-VH2-L3-VH1-Fc; VH1-L1-VH2-L2-VL2-L3-VL1-Fc; VL1-L1-VL2-L2-VH2-L3-VH1-L4-Fc; or VH1-L1-VH2-L2-VL2-L3-VL1-L4-Fc; wherein VL1 is a first immunoglobulin light chain variable region that specifically binds to A2AR, APRIL, ATPDase, BAFF, BAFFR, BCMA, BlyS, BTK, BTLA, B7DC, B7H1, B7H2, B7H3, B7H4, B7H5, B7H6, B7H7, B7RP1, B7-4, C3, C5, CCL2, CCL3, CCL4, CCLS, CCL7, CCL8, CCL11, CCL15, CCL17, CCL19, CCL20, CCL21, CCL25 CCR3, CCR4, CD3, CD16A, CD19, CD20, CD24, CD27, CD28, CD30, CD38, CD39, CD40, CD40L, CD47, CD52, CD70, CD80, CD86, CD123, CD133, CD137, CD137L, CD160, CD272, CEACAM5, CLEC9, CLEC91, CRTH2, CSF-1, CSF-2, CSF-3, CXCL1, CXCL2, CXCL4, CXCL12, CXCL13, CXCR3, cMet, CTLA4, DLL3, DLL4, DNGR-1, E-cadherin, EGFR, ENTPD1, EpCAM, FCER1, FCER1A, FCER2, FGFR, FLAP, FOLH1, Gi24, GITR, GITRL, GPRS, GP100, GPRC5D, HER2, HER3, ICOSL, ICOS, HHLA2, HMGB1, HVEM, IDO, IFNa, IgE, IGF1R, IL2Rbeta, IL1, ILIA, IL1B, IL1F10, IL2, IL4, IL4Ra, IL5, IL5R, IL6, IL7, IL7Ra, IL8, IL9, IL9R, IL10, rhIL1O, IL12, IL13, IL13Ra1, IL13Ra2, IL15, IL17, IL17Rb, IL18, IL22, IL23, IL25, IL7, IL33, IL35, ITGB4, ITK, KIR, LAG3, LAMP1, leptin, LPFS2, MHC class II, MUC-1, MUC-16, NCR3LG1, NKG2D, NKp46, NTPDase-1, OX40, OX40L, PD-1, PD-L1, PD-L2, PROM1, S152, SIRPalpha, SISP1, SLC, SPG64, ST2, STEAP1, STEAP2, Syk kinase, STEAP1, TROP2, TACI, TDO, TGFBETA, T14, TIGIT, TIM3, TLR, TLR2, TLR4, TLR5, TLR9, TMEF1, TNFa, TNFRSF7, Tp55, TREM1, TSLP, TSLPR, TWEAK, VEGF, VISTA, Vstm3, or WUCAM; VL2 is a second immunoglobulin light chain variable region that specifically binds to A2AR, APRIL, ATPDase, BAFF, BAFFR, BCMA, BlyS, BTK, BTLA, B7DC, B7H1, B7H2, B7H3, B7H4, B7H5, B7H6, B7H7, B7RP1, B7-4, C3, C5, CCL2, CCL3, CCL4, CCLS, CCL7, CCL8, CCL11, CCL15, CCL17, CCL19, CCL20, CCL21, CCL25 CCR3, CCR4, CD3, CD16A, CD19, CD20, CD24, CD27, CD28, CD30, CD38, CD39, CD40, CD40L, CD47, CD52, CD70, CD80, CD86, CD123, CD133, CD137, CD137L, CD160, CD272, CEACAM5, CLEC9, CLEC91, CRTH2, CSF-1, CSF-2, CSF-3, CXCL1, CXCL2, CXCL4, CXCL12, CXCL13, CXCR3, cMet, CTLA4, DLL3, DLL4, DNGR-1, E-cadherin, EGFR, ENTPD1, EpCAM, FCER1, FCER1A, FCER2, FGFR, FLAP, FOLH1, Gi24, GITR, GITRL, GPRS, GP100, GPRC5D, HER2, HER3, ICOSL, ICOS, HHLA2, HMGB1, HVEM, IDO, IFNa, IgE, IGF1R, IL2Rbeta, IL1, ILIA, IL1B, IL1F10, IL2, IL4, IL4Ra, IL5, IL5R, IL6, IL7, IL7Ra, IL8, IL9, IL9R, IL10, rhIL1O, IL12, IL13, IL13Ra1, IL13Ra2, IL15, IL17, IL17Rb, IL18, IL22, IL23, IL25, IL7, IL33, IL35, ITGB4, ITK, KIR, LAG3, LAMP1, leptin, LPFS2, MHC class II, MUC-1, MUC-16, NCR3LG1, NKG2D, NKp46, NTPDase-1, OX40, OX40L, PD-1, PD-L1, PD-L2, PROM1, S152, SIRPalpha, SISP1, SLC, SPG64, ST2, STEAP1, STEAP2, Syk kinase, STEAP1, TROP2, TACI, TDO, TGFBETA, T14, TIGIT, TIM3, TLR, TLR2, TLR4, TLR5, TLR9, TMEF1, TNFa, TNFRSF7, Tp55, TREM1, TSLP, TSLPR, TWEAK, VEGF, VISTA, Vstm3, or WUCAM; VH1 is a first immunoglobulin heavy chain variable region that specifically binds to A2AR, APRIL, ATPDase, BAFF, BAFFR, BCMA, BlyS, BTK, BTLA, B7DC, B7H1, B7H2, B7H3, B7H4, B7H5, B7H6, B7H7, B7RP1, B7-4, C3, C5, CCL2, CCL3, CCL4, CCL5, CCL7, CCL8, CCL11, CCL15, CCL17, CCL19, CCL20, CCL21, CCL25 CCR3, CCR4, CD3, CD16A, CD19, CD20, CD24, CD27, CD28, CD30, CD38, CD39, CD40, CD40L, CD47, CD52, CD70, CD80, CD86, CD123, CD133, CD137, CD137L, CD160, CD272, CEACAM5, CLEC9, CLEC91, CRTH2, CSF-1, CSF-2, CSF-3, CXCL1, CXCL2, CXCL4, CXCL12, CXCL13, CXCR3, cMet, CTLA4, DLL3, DLL4, DNGR-1, E-cadherin, EGFR, ENTPD1, EpCAM, FCER1, FCER1A, FCER2, FGFR, FLAP, FOLH1, Gi24, GITR, GITRL, GPR5, GP100, GPRC5D, HER2, HER3, ICOSL, ICOS, HHLA2, HMGB1, HVEM, IDO, IFNa, IgE, IGF1R, IL2Rbeta, IL1, ILIA, IL1B, IL1F10, IL2, IL4, IL4Ra, IL5, IL5R, IL6, IL7, IL7Ra, IL8, IL9, IL9R, IL10, rhIL1O, IL12, IL13, IL13Ra1, IL13Ra2, IL15, IL17, IL17Rb, IL18, IL22, IL23, IL25, IL7, IL33, IL35, ITGB4, ITK, KIR, LAG3, LAMP1, leptin, LPFS2, MHC class II, MUC-1, MUC-16, NCR3LG1, NKG2D, NKp46, NTPDase-1, OX40, OX40L, PD-1, PD-L1, PD-L2, PROM1, S152, SIRPalpha, SISP1, SLC, SPG64, ST2, STEAP1, STEAP2, Syk kinase, STEAP1, TROP2, TACI, TDO, TGFBETA, T14, TIGIT, TIM3, TLR, TLR2, TLR4, TLR5, TLR9, TMEF1, TNFa, TNFRSF7, Tp55, TREM1, TSLP, TSLPR, TWEAK, VEGF, VISTA, Vstm3, or WUCAM; VH2 is a second immunoglobulin heavy chain variable region that specifically binds to A2AR, APRIL, ATPDase, BAFF, BAFFR, BCMA, BlyS, BTK, BTLA, B7DC, B7H1, B7H2, B7H3, B7H4, B7H5, B7H6, B7H7, B7RP1, B7-4, C3, C5, CCL2, CCL3, CCL4, CCL5, CCL7, CCL8, CCL11, CCL15, CCL17, CCL19, CCL20, CCL21, CCL25 CCR3, CCR4, CD3, CD16A, CD19, CD20, CD24, CD27, CD28, CD30, CD38, CD39, CD40, CD40L, CD47, CD52, CD70, CD80, CD86, CD123, CD133, CD137, CD137L, CD160, CD272, CEACAM5, CLEC9, CLEC91, CRTH2, CSF-1, CSF-2, CSF-3, CXCL1, CXCL2, CXCL4, CXCL12, CXCL13, CXCR3, cMet, CTLA4, DLL3, DLL4, DNGR-1, E-cadherin, EGFR, ENTPD1, EpCAM, FCER1, FCER1A, FCER2, FGFR, FLAP, FOLH1, Gi24, GITR, GITRL, GPR5, GP100, GPRC5D, HER2, HER3, ICOSL, ICOS, HHLA2, HMGB1, HVEM, IDO, IFNa, IgE, IGF1R, IL2Rbeta, IL1, ILIA, IL1B, IL1F10, IL2, IL4, IL4Ra, IL5, IL5R, IL6, IL7, IL7Ra, IL8, IL9, IL9R, IL10, rhIL1O, IL12, IL13, IL13Ra1, IL13Ra2, IL15, IL17, IL17Rb, IL18, IL22, IL23, IL25, IL7, IL33, IL35, ITGB4, ITK, KIR, LAG3, LAMP1, leptin, LPFS2, MHC class II, MUC-1, MUC-16, NCR3LG1, NKG2D, NKp46, NTPDase-1, OX40, OX40L, PD-1, PD-L1, PD-L2, PROM1, S152, SIRPalpha, SISP1, SLC, SPG64, ST2, STEAP1, STEAP2, Syk kinase, STEAP1, TROP2, TACI, TDO, TGFBETA, T14, TIGIT, TIM3, TLR, TLR2, TLR4, TLR5, TLR9, TMEF1, TNFa, TNFRSF7, Tp55, TREM1, TSLP, TSLPR, TWEAK, VEGF, VISTA, Vstm3, or WUCAM; Fc is a region comprising an immunoglobulin heavy chain constant region 2 (CH2), an immunoglobulin heavy chain constant region 3 (CH3), and optionally, an immunoglobulin hinge; and L1, L2, L3 and L4 are amino acid linkers. In some aspects, the first polypeptide has the structure VL1-VL2-VH2-VH1-Fc and the second polypeptide has the structure VL1-VL2-VH2-VH1-Fc. In some aspects, the first polypeptide has the structure VH1-VH2-VL2-VL1-Fc and the second polypeptide has the structure VH1-VH2-VL2-VL1-Fc. In some aspects, the first polypeptide has the structure VH1-VH2-VL2-VL1-Fc and the second polypeptide has the structure VL1-VL2-VH2-VH1-Fc. In some aspects, the first polypeptide has the structure VL1-VL2-VH2-VH1-Fc and the second polypeptide has the structure VH1-VH2-VL2-VL1-Fc. In some aspects, the first polypeptide has the structure VL1-VL2-VH2-VH1-Fc and the second polypeptide has the structure Fc. In some aspects, the first polypeptide has the structure VH1-VH2-VL2-VL1-Fc, and the second polypeptide has the structure Fc. In the above aspects of the invention, the VL1, VL2, VH1, VH2 and Fc may be linked by one or more amino acid linker e.g. to form the structure VL1-L1-VL2-L2-VH2-L3-VH1-Fc; VH1-L1-VH2-L2-VL2-L3-VL1-Fc; VL1-L1-VL2-L2-VH2-L3-VH1-L4-Fc; or VH1-L1-VH2-L2-VL2-L3-VL1-L4-Fc. The VL1, VL2, VH1, and/or VH2 may specifically bind to A2AR, APRIL, ATPDase, BAFF, BAFFR, BCMA, BlyS, BTK, BTLA, B7DC, B7H1, B7H2, B7H3, B7H4, B7H5, B7H6, B7H7, B7RP1, B7-4, C3, C5, CCL2, CCL3, CCL4, CCL5, CCL7, CCL8, CCL11, CCL15, CCL17, CCL19, CCL20, CCL21, CCL25 CCR3, CCR4, CD3, CD16A, CD19, CD20, CD24, CD27, CD28, CD30, CD38, CD39, CD40, CD40L, CD47, CD52, CD70, CD80, CD86, CD123, CD133, CD137, CD137L, CD160, CD272, CEACAM5, CLEC9, CLEC91, CRTH2, CSF-1, CSF-2, CSF-3, CXCL1, CXCL2, CXCL4, CXCL12, CXCL13, CXCR3, cMet, CTLA4, DLL3, DLL4, DNGR-1, E-cadherin, EGFR, ENTPD1, EpCAM, FCER1, FCER1A, FCER2, FGFR, FLAP, FOLH1, Gi24, GITR, GITRL, GPR5, GP100, GPRC5D, HER2, HER3, ICOSL, ICOS, HHLA2, HMGB1, HVEM, IDO, IFNa, IgE, IGF1R, IL2Rbeta, IL1, ILIA, IL1B, IL1F10, IL2, IL4, IL4Ra, IL5, IL5R, IL6, IL7, IL7Ra, IL8, IL9, IL9R, IL10, rhIL1O, IL12, IL13, IL13Ra1, IL13Ra2, IL15, IL17, IL17Rb, IL18, IL22, IL23, IL25, IL7, IL33, IL35, ITGB4, ITK, KIR, LAG3, LAMP1, leptin, LPFS2, MHC class II, MUC-1, MUC-16, NCR3LG1, NKG2D, NKp46, NTPDase-1, OX40, OX40L, PD-1, PD-L1, PD-L2, PROM1, S152, SIRPalpha, SISP1, SLC, SPG64, ST2, STEAP1, STEAP2, Syk kinase, STEAP1, TROP2, TACI, TDO, TGFBETA, T14, TIGIT, TIM3, TLR, TLR2, TLR4, TLR5, TLR9, TMEF1, TNFa, TNFRSF7, Tp55, TREM1, TSLP, TSLPR, TWEAK, VEGF, VISTA, Vstm3, or WUCAM. For the avoidance of doubt, all the antigen binding polypeptide complex structures described herein can be combined with any one or more of the targets described herein. Any and all disclosure herein in relation to targets for antigen binding polypeptides of the invention is generally applicable, and applies equally and without reservation to each and every antigen binding polypeptide and antigen binding polypeptide complex described herein. For the avoidance of doubt, the VL1, VL2, VH1, and/or VH2 of each and every antigen binding polypeptide and antigen binding polypeptide complex described herein may independently bind to any one of said particularly preferred targets. Any and all disclosure herein in relation to targets for antigen binding polypeptides of the invention is generally applicable, and applies equally and without reservation to each and every antigen binding polypeptide and antigen binding polypeptide complex described herein. For the avoidance of doubt, the VL1, VL2, VH1, and/or VH2 of each and every antigen binding polypeptide and antigen binding polypeptide complex described herein may independently bind to any one of said particularly preferred targets. In some aspects, the antigen binding polypeptide has a structure represented by VL1-VL2-VH2-VH1-CH1-CL; VH1-VH2-VL2-VL1-CH1-CL; VL1-VL2-VH2-VH1-CL-CH1; VH1-VH2-VL2-VL1-CL-CH1; VL1-L1-VL2-L2-VH2-L3-VH1-L4-CH1-CL; VH1-L1-VH2-L2-VL2-L3-VL1-L4-CH1-CL; VL1-L1-VL2-L2-VH2-L3-VH1-L4-CL-CH1; VH1-L1-VH2-L2-VL2-L3-VL1-L4-CL-CH1; VL1-L1-VL2-L2-VH2-L3-VH1-L4-CH1-L5-CL; VH1-L1-VH2-L2- VL2-L3-VL1-L4-CH1-L5-CL; VL1-L1-VL2-L2-VH2-L3-VH1-L4-CL-L5-CH1; or VH1-L1-VH2-L2-VL2-L3-VL1-L4-CL-L5-CH1; wherein VL1 is a first immunoglobulin light chain variable region that specifically binds to A2AR, APRIL, ATPDase, BAFF, BAFFR, BCMA, BlyS, BTK, BTLA, B7DC, B7H1, B7H2, B7H3, B7H4, B7H5, B7H6, B7H7, B7RP1, B7-4, C3, C5, CCL2, CCL3, CCL4, CCL5, CCL7, CCL8, CCL11, CCL15, CCL17, CCL19, CCL20, CCL21, CCL25 CCR3, CCR4, CD3, CD16A, CD19, CD20, CD24, CD27, CD28, CD30, CD38, CD39, CD40, CD40L, CD47, CD52, CD70, CD80, CD86, CD123, CD133, CD137, CD137L, CD160, CD272, CEACAM5, CLEC9, CLEC91, CRTH2, CSF-1, CSF-2, CSF-3, CXCL1, CXCL2, CXCL4, CXCL12, CXCL13, CXCR3, cMet, CTLA4, DLL3, DLL4, DNGR-1, E-cadherin, EGFR, ENTPD1, EpCAM, FCER1, FCER1A, FCER2, FGFR, FLAP, FOLH1, Gi24, GITR, GITRL, GPR5, GP100, GPRC5D, HER2, HER3, ICOSL, ICOS, HHLA2, HMGB1, HVEM, IDO, IFNa, IgE, IGF1R, IL2Rbeta, IL1, ILIA, IL1B, IL1F10, IL2, IL4, IL4Ra, IL5, IL5R, IL6, IL7, IL7Ra, IL8, IL9, IL9R, IL10, rhIL1O, IL12, IL13, IL13Ra1, IL13Ra2, IL15, IL17, IL17Rb, IL18, IL22, IL23, IL25, IL7, IL33, IL35, ITGB4, ITK, KIR, LAG3, LAMP1, leptin, LPFS2, MHC class II, MUC-1, MUC-16, NCR3LG1, NKG2D, NKp46, NTPDase-1, OX40, OX40L, PD-1, PD-L1, PD-L2, PROM1, S152, SIRPalpha, SISP1, SLC, SPG64, ST2, STEAP1, STEAP2, Syk kinase, STEAP1, TROP2, TACI, TDO, TGFBETA, T14, TIGIT, TIM3, TLR, TLR2, TLR4, TLR5, TLR9, TMEF1, TNFa, TNFRSF7, Tp55, TREM1, TSLP, TSLPR, TWEAK, VEGF, VISTA, Vstm3, or WUCAM; VL2 is a second immunoglobulin light chain variable region that specifically binds to A2AR, APRIL, ATPDase, BAFF, BAFFR, BCMA, BlyS, BTK, BTLA, B7DC, B7H1, B7H2, B7H3, B7H4, B7H5, B7H6, B7H7, B7RP1, B7-4, C3, C5, CCL2, CCL3, CCL4, CCL5, CCL7, CCL8, CCL11, CCL15, CCL17, CCL19, CCL20, CCL21, CCL25 CCR3, CCR4, CD3, CD16A, CD19, CD20, CD24, CD27, CD28, CD30, CD38, CD39, CD40, CD40L, CD47, CD52, CD70, CD80, CD86, CD123, CD133, CD137, CD137L, CD160, CD272, CEACAM5, CLEC9, CLEC91, CRTH2, CSF-1, CSF-2, CSF-3, CXCL1, CXCL2, CXCL4, CXCL12, CXCL13, CXCR3, cMet, CTLA4, DLL3, DLL4, DNGR-1, E-cadherin, EGFR, ENTPD1, EpCAM, FCER1, FCER1A, FCER2, FGFR, FLAP, FOLH1, Gi24, GITR, GITRL, GPR5, GP100, GPRC5D, HER2, HER3, ICOSL, ICOS, HHLA2, HMGB1, HVEM, IDO, IFNa, IgE, IGF1R, IL2Rbeta, IL1, ILIA, IL1B, IL1F10, IL2, IL4, IL4Ra, IL5, IL5R, IL6, IL7, IL7Ra, IL8, IL9, IL9R, IL10, rhIL1O, IL12, IL13, IL13Ra1, IL13Ra2, IL15, IL17, IL17Rb, IL18, IL22, IL23, IL25, IL7, IL33, IL35, ITGB4, ITK, KIR, LAG3, LAMP1, leptin, LPFS2, MHC class II, MUC-1, MUC-16, NCR3LG1, NKG2D, NKp46, NTPDase-1, OX40, OX40L, PD-1, PD-L1, PD-L2, PROM1, S152, SIRPalpha, SISP1, SLC, SPG64, ST2, STEAP1, STEAP2, Syk kinase, STEAP1, TROP2, TACI, TDO, TGFBETA, T14, TIGIT, TIM3, TLR, TLR2, TLR4, TLR5, TLR9, TMEF1, TNFa, TNFRSF7, Tp55, TREM1, TSLP, TSLPR, TWEAK, VEGF, VISTA, Vstm3, or WUCAM; VH1 is a first immunoglobulin heavy chain variable region that specifically binds to A2AR, APRIL, ATPDase, BAFF, BAFFR, BCMA, BlyS, BTK, BTLA, B7DC, B7H1, B7H2, B7H3, B7H4, B7H5, B7H6, B7H7, B7RP1, B7-4, C3, C5, CCL2, CCL3, CCL4, CCL5, CCL7, CCL8, CCL11, CCL15, CCL17, CCL19, CCL20, CCL21, CCL25 CCR3, CCR4, CD3, CD16A, CD19, CD20, CD24, CD27, CD28, CD30, CD38, CD39, CD40, CD40L, CD47, CD52, CD70, CD80, CD86, CD123, CD133, CD137, CD137L, CD160, CD272, CEACAM5, CLEC9, CLEC91, CRTH2, CSF-1, CSF-2, CSF-3, CXCL1, CXCL2, CXCL4, CXCL12, CXCL13, CXCR3, cMet, CTLA4, DLL3, DLL4, DNGR-1, E-cadherin, EGFR, ENTPD1, EpCAM, FCER1, FCER1A, FCER2, FGFR, FLAP, FOLH1, Gi24, GITR, GITRL, GPR5, GP100, GPRC5D, HER2, HER3, ICOSL, ICOS, HHLA2, HMGB1, HVEM, IDO, IFNa, IgE, IGF1R, IL2Rbeta, IL1, ILIA, IL1B, IL1F10, IL2, IL4, IL4Ra, IL5, IL5R, IL6, IL7, IL7Ra, IL8, IL9, IL9R, IL10, rhIL1O, IL12, IL13, IL13Ra1, IL13Ra2, IL15, IL17, IL17Rb, IL18, IL22, IL23, IL25, IL7, IL33, IL35, ITGB4, ITK, KIR, LAG3, LAMP1, leptin, LPFS2, MHC class II, MUC-1, MUC-16, NCR3LG1, NKG2D, NKp46, NTPDase-1, OX40, OX40L, PD-1, PD-L1, PD-L2, PROM1, S152, SIRPalpha, SISP1, SLC, SPG64, ST2, STEAP1, STEAP2, Syk kinase, STEAP1, TROP2, TACI, TDO, TGFBETA, T14, TIGIT, TIM3, TLR, TLR2, TLR4, TLR5, TLR9, TMEF1, TNFa, TNFRSF7, Tp55, TREM1, TSLP, TSLPR, TWEAK, VEGF, VISTA, Vstm3, or WUCAM; VH2 is a second immunoglobulin heavy chain variable region that specifically binds to A2AR, APRIL, ATPDase, BAFF, BAFFR, BCMA, BlyS, BTK, BTLA, B7DC, B7H1, B7H2, B7H3, B7H4, B7H5, B7H6, B7H7, B7RP1, B7-4, C3, C5, CCL2, CCL3, CCL4, CCLS, CCL7, CCL8, CCL11, CCL15, CCL17, CCL19, CCL20, CCL21, CCL25 CCR3, CCR4, CD3, CD16A, CD19, CD20, CD24, CD27, CD28, CD30, CD38, CD39, CD40, CD40L, CD47, CD52, CD70, CD80, CD86, CD123, CD133, CD137, CD137L, CD160, CD272, CEACAM5, CLEC9, CLEC91, CRTH2, CSF-1, CSF-2, CSF-3, CXCL1, CXCL2, CXCL4, CXCL12, CXCL13, CXCR3, cMet, CTLA4, DLL3, DLL4, DNGR-1, E-cadherin, EGFR, ENTPD1, EpCAM, FCER1, FCER1A, FCER2, FGFR, FLAP, FOLH1, Gi24, GITR, GITRL, GPRS, GP100, GPRC5D, HER2, HER3, ICOSL, ICOS, HHLA2, HMGB1, HVEM, IDO, IFNa, IgE, IGF1R, IL2Rbeta, IL1, ILIA, IL1B, IL1F10, IL2, IL4, IL4Ra, IL5, IL5R, IL6, IL7, IL7Ra, IL8, IL9, IL9R, IL10, rhIL1O, IL12, IL13, IL13Ra1, IL13Ra2, IL15, IL17, IL17Rb, IL18, IL22, IL23, IL25, IL7, IL33, IL35, ITGB4, ITK, KIR, LAG3, LAMP1, leptin, LPFS2, MHC class II, MUC-1, MUC-16, NCR3LG1, NKG2D, NKp46, NTPDase-1, OX40, OX40L, PD-1, PD-L1, PD-L2, PROM1, S152, SIRPalpha, SISP1, SLC, SPG64, ST2, STEAP1, STEAP2, Syk kinase, STEAP1, TROP2, TACI, TDO, TGFBETA, T14, TIGIT, TIM3, TLR, TLR2, TLR4, TLR5, TLR9, TMEF1, TNFa, TNFRSF7, Tp55, TREM1, TSLP, TSLPR, TWEAK, VEGF, VISTA, Vstm3, or WUCAM; CH1 is an immunoglobulin heavy chain constant region 1; CL is an immunoglobulin light chain constant region; and L1, L2, L3, L4 and L5 are amino acid linkers. In some aspects, the antigen binding polypeptide has a structure represented by VL1-VL2-VH2-VH1-CH1-CL, wherein VL1, VL2, VH1 and/or VH2 specifically binds to A2AR, APRIL, ATPDase, BAFF, BAFFR, BCMA, BlyS, BTK, BTLA, B7DC, B7H1, B7H2, B7H3, B7H4, B7H5, B7H6, B7H7, B7RP1, B7-4, C3, C5, CCL2, CCL3, CCL4, CCLS, CCL7, CCL8, CCL11, CCL15, CCL17, CCL19, CCL20, CCL21, CCL25 CCR3, CCR4, CD3, CD16A, CD19, CD20, CD24, CD27, CD28, CD30, CD38, CD39, CD40, CD40L, CD47, CD52, CD70, CD80, CD86, CD123, CD133, CD137, CD137L, CD160, CD272, CEACAM5, CLEC9, CLEC91, CRTH2, CSF-1, CSF-2, CSF-3, CXCL1, CXCL2, CXCL4, CXCL12, CXCL13, CXCR3, cMet, CTLA4, DLL3, DLL4, DNGR-1, E-cadherin, EGFR, ENTPD1, EpCAM, FCER1, FCER1A, FCER2, FGFR, FLAP, FOLH1, Gi24, GITR, GITRL, GPRS, GP100, GPRC5D, HER2, HER3, ICOSL, ICOS, HHLA2, HMGB1, HVEM, IDO, IFNa, IgE, IGF1R, IL2Rbeta, IL1, ILIA, IL1B, IL1F10, IL2, IL4, IL4Ra, IL5, IL5R, IL6, IL7, IL7Ra, IL8, IL9, IL9R, IL10, rhIL1O, IL12, IL13, IL13Ra1, IL13Ra2, IL15, IL17, IL17Rb, IL18, IL22, IL23, IL25, IL7, IL33, IL35, ITGB4, ITK, KIR, LAG3, LAMP1, leptin, LPFS2, MHC class II, MUC-1, MUC-16, NCR3LG1, NKG2D, NKp46, NTPDase-1, OX40, OX40L, PD-1, PD-L1, PD-L2, PROM1, S152, SIRPalpha, SISP1, SLC, SPG64, ST2, STEAP1, STEAP2, Syk kinase, STEAP1, TROP2, TACI, TDO, TGFBETA, T14, TIGIT, TIM3, TLR, TLR2, TLR4, TLR5, TLR9, TMEF1, TNFa, TNFRSF7, Tp55, TREM1, TSLP, TSLPR, TWEAK, VEGF, VISTA, Vstm3, or WUCAM. In some aspects, the antigen binding polypeptide has a structure represented by VH1-VH2-VL2-VL1-CH1-CL, wherein VL1, VL2, VH1 and/or VH2 specifically binds to A2AR, APRIL, ATPDase, BAFF, BAFFR, BCMA, BlyS, BTK, BTLA, B7DC, B7H1, B7H2, B7H3, B7H4, B7H5, B7H6, B7H7, B7RP1, B7-4, C3, C5, CCL2, CCL3, CCL4, CCL5, CCL7, CCL8, CCL11, CCL15, CCL17, CCL19, CCL20, CCL21, CCL25 CCR3, CCR4, CD3, CD16A, CD19, CD20, CD24, CD27, CD28, CD30, CD38, CD39, CD40, CD40L, CD47, CD52, CD70, CD80, CD86, CD123, CD133, CD137, CD137L, CD160, CD272, CEACAM5, CLEC9, CLEC91, CRTH2, CSF-1, CSF-2, CSF-3, CXCL1, CXCL2, CXCL4, CXCL12, CXCL13, CXCR3, cMet, CTLA4, DLL3, DLL4, DNGR-1, E-cadherin, EGFR, ENTPD1, EpCAM, FCER1, FCER1A, FCER2, FGFR, FLAP, FOLH1, Gi24, GITR, GITRL, GPR5, GP100, GPRC5D, HER2, HER3, ICOSL, ICOS, HHLA2, HMGB1, HVEM, IDO, IFNa, IgE, IGF1R, IL2Rbeta, IL1, ILIA, IL1B, IL1F10, IL2, IL4, IL4Ra, IL5, IL5R, IL6, IL7, IL7Ra, IL8, IL9, IL9R, IL10, rhIL1O, IL12, IL13, IL13Ra1, IL13Ra2, IL15, IL17, IL17Rb, IL18, IL22, IL23, IL25, IL7, IL33, IL35, ITGB4, ITK, KIR, LAG3, LAMP1, leptin, LPFS2, MHC class II, MUC-1, MUC-16, NCR3LG1, NKG2D, NKp46, NTPDase-1, OX40, OX40L, PD-1, PD-L1, PD-L2, PROM1, S152, SIRPalpha, SISP1, SLC, SPG64, ST2, STEAP1, STEAP2, Syk kinase, STEAP1, TROP2, TACI, TDO, TGFBETA, T14, TIGIT, TIM3, TLR, TLR2, TLR4, TLR5, TLR9, TMEF1, TNFa, TNFRSF7, Tp55, TREM1, TSLP, TSLPR, TWEAK, VEGF, VISTA, Vstm3, or WUCAM. In some aspects, the antigen binding polypeptide has a structure represented by VL1-VL2-VH2-VH1-CL-CH1, wherein VL1, VL2, VH1 and/or VH2 specifically binds to A2AR, APRIL, ATPDase, BAFF, BAFFR, BCMA, BlyS, BTK, BTLA, B7DC, B7H1, B7H2, B7H3, B7H4, B7H5, B7H6, B7H7, B7RP1, B7-4, C3, C5, CCL2, CCL3, CCL4, CCL5, CCL7, CCL8, CCL11, CCL15, CCL17, CCL19, CCL20, CCL21, CCL25 CCR3, CCR4, CD3, CD16A, CD19, CD20, CD24, CD27, CD28, CD30, CD38, CD39, CD40, CD40L, CD47, CD52, CD70, CD80, CD86, CD123, CD133, CD137, CD137L, CD160, CD272, CEACAM5, CLEC9, CLEC91, CRTH2, CSF-1, CSF-2, CSF-3, CXCL1, CXCL2, CXCL4, CXCL12, CXCL13, CXCR3, cMet, CTLA4, DLL3, DLL4, DNGR-1, E-cadherin, EGFR, ENTPD1, EpCAM, FCER1, FCER1A, FCER2, FGFR, FLAP, FOLH1, Gi24, GITR, GITRL, GPR5, GP100, GPRC5D, HER2, HER3, ICOSL, ICOS, HHLA2, HMGB1, HVEM, IDO, IFNa, IgE, IGF1R, IL2Rbeta, IL1, ILIA, IL1B, IL1F10, IL2, IL4, IL4Ra, IL5, IL5R, IL6, IL7, IL7Ra, IL8, IL9, IL9R, IL10, rhIL1O, IL12, IL13, IL13Ra1, IL13Ra2, IL15, IL17, IL17Rb, IL18, IL22, IL23, IL25, IL7, IL33, IL35, ITGB4, ITK, KIR, LAG3, LAMP1, leptin, LPFS2, MHC class II, MUC-1, MUC-16, NCR3LG1, NKG2D, NKp46, NTPDase-1, OX40, OX40L, PD-1, PD-L1, PD-L2, PROM1, S152, SIRPalpha, SISP1, SLC, SPG64, ST2, STEAP1, STEAP2, Syk kinase, STEAP1, TROP2, TACI, TDO, TGFBETA, T14, TIGIT, TIM3, TLR, TLR2, TLR4, TLR5, TLR9, TMEF1, TNFa, TNFRSF7, Tp55, TREM1, TSLP, TSLPR, TWEAK, VEGF, VISTA, Vstm3, or WUCAM. In some aspects, the antigen binding polypeptide has a structure represented by VH1-VH2-VL2-VL1-CL-CH1, wherein VL1, VL2, VH1 and/or VH2 specifically binds to A2AR, APRIL, ATPDase, BAFF, BAFFR, BCMA, BlyS, BTK, BTLA, B7DC, B7H1, B7H2, B7H3, B7H4, B7H5, B7H6, B7H7, B7RP1, B7-4, C3, C5, CCL2, CCL3, CCL4, CCL5, CCL7, CCL8, CCL11, CCL15, CCL17, CCL19, CCL20, CCL21, CCL25 CCR3, CCR4, CD3, CD16A, CD19, CD20, CD24, CD27, CD28, CD30, CD38, CD39, CD40, CD40L, CD47, CD52, CD70, CD80, CD86, CD123, CD133, CD137, CD137L, CD160, CD272, CEACAM5, CLEC9, CLEC91, CRTH2, CSF-1, CSF-2, CSF-3, CXCL1, CXCL2, CXCL4, CXCL12, CXCL13, CXCR3, cMet, CTLA4, DLL3, DLL4, DNGR-1, E-cadherin, EGFR, ENTPD1, EpCAM, FCER1, FCER1A, FCER2, FGFR, FLAP, FOLH1, Gi24, GITR, GITRL, GPR5, GP100, GPRC5D, HER2, HER3, ICOSL, ICOS, HHLA2, HMGB1, HVEM, IDO, IFNa, IgE, IGF1R, IL2Rbeta, IL1, ILIA, IL1B, IL1F10, IL2, IL4, IL4Ra, IL5, IL5R, IL6, IL7, IL7Ra, IL8, IL9, IL9R, IL10, rhIL1O, IL12, IL13, IL13Ra1, IL13Ra2, IL15, IL17, IL17Rb, IL18, IL22, IL23, IL25, IL7, IL33, IL35, ITGB4, ITK, KIR, LAG3, LAMP1, leptin, LPFS2, MHC class II, MUC-1, MUC-16, NCR3LG1, NKG2D, NKp46, NTPDase-1, OX40, OX40L, PD-1, PD-L1, PD-L2, PROM1, S152, SIRPalpha, SISP1, SLC, SPG64, ST2, STEAP1, STEAP2, Syk kinase, STEAP1, TROP2, TACI, TDO, TGFBETA, T14, TIGIT, TIM3, TLR, TLR2, TLR4, TLR5, TLR9, TMEF1, TNFa, TNFRSF7, Tp55, TREM1, TSLP, TSLPR, TWEAK, VEGF, VISTA, Vstm3, or WUCAM. In some aspects, the antigen binding polypeptide has a structure represented by VL1-L1-VL2-L2-VH2-L3-VH1-L4-CH1-CL, wherein VL1, VL2, VH1 and/or VH2 specifically binds to A2AR, APRIL, ATPDase, BAFF, BAFFR, BCMA, BlyS, BTK, BTLA, B7DC, B7H1, B7H2, B7H3, B7H4, B7H5, B7H6, B7H7, B7RP1, B7-4, C3, C5, CCL2, CCL3, CCL4, CCL5, CCL7, CCL8, CCL11, CCL15, CCL17, CCL19, CCL20, CCL21, CCL25 CCR3, CCR4, CD3, CD16A, CD19, CD20, CD24, CD27, CD28, CD30, CD38, CD39, CD40, CD40L, CD47, CD52, CD70, CD80, CD86, CD123, CD133, CD137, CD137L, CD160, CD272, CEACAM5, CLEC9, CLEC91, CRTH2, CSF-1, CSF-2, CSF-3, CXCL1, CXCL2, CXCL4, CXCL12, CXCL13, CXCR3, cMet, CTLA4, DLL3, DLL4, DNGR-1, E-cadherin, EGFR, ENTPD1, EpCAM, FCER1, FCER1A, FCER2, FGFR, FLAP, FOLH1, Gi24, GITR, GITRL, GPR5, GP100, GPRC5D, HER2, HER3, ICOSL, ICOS, HHLA2, HMGB1, HVEM, IDO, IFNa, IgE, IGF1R, IL2Rbeta, IL1, ILIA, IL1B, IL1F10, IL2, IL4, IL4Ra, IL5, IL5R, IL6, IL7, IL7Ra, IL8, IL9, IL9R, IL10, rhIL1O, IL12, IL13, IL13Ra1, IL13Ra2, IL15, IL17, IL17Rb, IL18, IL22, IL23, IL25, IL7, IL33, IL35, ITGB4, ITK, KIR, LAG3, LAMP1, leptin, LPFS2, MHC class II, MUC-1, MUC-16, NCR3LG1, NKG2D, NKp46, NTPDase-1, OX40, OX40L, PD-1, PD-L1, PD-L2, PROM1, S152, SIRPalpha, SISP1, SLC, SPG64, ST2, STEAP1, STEAP2, Syk kinase, STEAP1, TROP2, TACI, TDO, TGFBETA, T14, TIGIT, TIM3, TLR, TLR2, TLR4, TLR5, TLR9, TMEF1, TNFa, TNFRSF7, Tp55, TREM1, TSLP, TSLPR, TWEAK, VEGF, VISTA, Vstm3, or WUCAM. In some aspects, the antigen binding polypeptide has a structure represented by VH1-L1-VH2-L2-VL2-L3-VL1-L4-CH1-CL, wherein VL1, VL2, VH1 and/or VH2 specifically binds to A2AR, APRIL, ATPDase, BAFF, BAFFR, BCMA, BlyS, BTK, BTLA, B7DC, B7H1, B7H2, B7H3, B7H4, B7H5, B7H6, B7H7, B7RP1, B7-4, C3, C5, CCL2, CCL3, CCL4, CCL5, CCL7, CCL8, CCL11, CCL15, CCL17, CCL19, CCL20, CCL21, CCL25 CCR3, CCR4, CD3, CD16A, CD19, CD20, CD24, CD27, CD28, CD30, CD38, CD39, CD40, CD40L, CD47, CD52, CD70, CD80, CD86, CD123, CD133, CD137, CD137L, CD160, CD272, CEACAM5, CLEC9, CLEC91, CRTH2, CSF-1, CSF-2, CSF-3, CXCL1, CXCL2, CXCL4, CXCL12, CXCL13, CXCR3, cMet, CTLA4, DLL3, DLL4, DNGR-1, E-cadherin, EGFR, ENTPD1, EpCAM, FCER1, FCER1A, FCER2, FGFR, FLAP, FOLH1, Gi24, GITR, GITRL, GPR5, GP100, GPRC5D, HER2, HER3, ICOSL, ICOS, HHLA2, HMGB1, HVEM, IDO, IFNa, IgE, IGF1R, IL2Rbeta, IL1, ILIA, IL1B, IL1F10, IL2, IL4, IL4Ra, IL5, IL5R, IL6, IL7, IL7Ra, IL8, IL9, IL9R, IL10, rhIL1O, IL12, IL13, IL13Ra1, IL13Ra2, IL15, IL17, IL17Rb, IL18, IL22, IL23, IL25, IL7, IL33, IL35, ITGB4, ITK, KIR, LAG3, LAMP1, leptin, LPFS2, MHC class II, MUC-1, MUC-16, NCR3LG1, NKG2D, NKp46, NTPDase-1, OX40, OX40L, PD-1, PD-L1, PD-L2, PROM1, S152, SIRPalpha, SISP1, SLC, SPG64, ST2, STEAP1, STEAP2, Syk kinase, STEAP1, TROP2, TACI, TDO, TGFBETA, T14, TIGIT, TIM3, TLR, TLR2, TLR4, TLR5, TLR9, TMEF1, TNFa, TNFRSF7, Tp55, TREM1, TSLP, TSLPR, TWEAK, VEGF, VISTA, Vstm3, or WUCAM. In some aspects, the antigen binding polypeptide has a structure represented by VL1-L1-VL2-L2-VH2-L3-VH1-L4-CL-CH1, wherein VL1, VL2, VH1 and/or VH2 specifically binds to A2AR, APRIL, ATPDase, BAFF, BAFFR, BCMA, BlyS, BTK, BTLA, B7DC, B7H1, B7H2, B7H3, B7H4, B7H5, B7H6, B7H7, B7RP1, B7-4, C3, C5, CCL2, CCL3, CCL4, CCL5, CCL7, CCL8, CCL11, CCL15, CCL17, CCL19, CCL20, CCL21, CCL25 CCR3, CCR4, CD3, CD16A, CD19, CD20, CD24, CD27, CD28, CD30, CD38, CD39, CD40, CD40L, CD47, CD52, CD70, CD80, CD86, CD123, CD133, CD137, CD137L, CD160, CD272, CEACAM5, CLEC9, CLEC91, CRTH2, CSF-1, CSF-2, CSF-3, CXCL1, CXCL2, CXCL4, CXCL12, CXCL13, CXCR3, cMet, CTLA4, DLL3, DLL4, DNGR-1, E-cadherin, EGFR, ENTPD1, EpCAM, FCER1, FCER1A, FCER2, FGFR, FLAP, FOLH1, Gi24, GITR, GITRL, GPR5, GP100, GPRC5D, HER2, HER3, ICOSL, ICOS, HHLA2, HMGB1, HVEM, IDO, IFNa, IgE, IGF1R, IL2Rbeta, IL1, ILIA, IL1B, IL1F10, IL2, IL4, IL4Ra, IL5, IL5R, IL6, IL7, IL7Ra, IL8, IL9, IL9R, IL10, rhIL1O, IL12, IL13, IL13Ra1, IL13Ra2, IL15, IL17, IL17Rb, IL18, IL22, IL23, IL25, IL7, IL33, IL35, ITGB4, ITK, KIR, LAG3, LAMP1, leptin, LPFS2, MHC class II, MUC-1, MUC-16, NCR3LG1, NKG2D, NKp46, NTPDase-1, OX40, OX40L, PD-1, PD-L1, PD-L2, PROM1, S152, SIRPalpha, SISP1, SLC, SPG64, ST2, STEAP1, STEAP2, Syk kinase, STEAP1, TROP2, TACI, TDO, TGFBETA, T14, TIGIT, TIM3, TLR, TLR2, TLR4, TLR5, TLR9, TMEF1, TNFa, TNFRSF7, Tp55, TREM1, TSLP, TSLPR, TWEAK, VEGF, VISTA, Vstm3, or WUCAM. In some aspects, the antigen binding polypeptide has a structure represented by VH1-L1-VH2-L2-VL2-L3-VL1-L4-CL-CH1, wherein VL1, VL2, VH1 and/or VH2 specifically binds to A2AR, APRIL, ATPDase, BAFF, BAFFR, BCMA, BlyS, BTK, BTLA, B7DC, B7H1, B7H2, B7H3, B7H4, B7H5, B7H6, B7H7, B7RP1, B7-4, C3, C5, CCL2, CCL3, CCL4, CCL5, CCL7, CCL8, CCL11, CCL15, CCL17, CCL19, CCL20, CCL21, CCL25 CCR3, CCR4, CD3, CD16A, CD19, CD20, CD24, CD27, CD28, CD30, CD38, CD39, CD40, CD40L, CD47, CD52, CD70, CD80, CD86, CD123, CD133, CD137, CD137L, CD160, CD272, CEACAM5, CLEC9, CLEC91, CRTH2, CSF-1, CSF-2, CSF-3, CXCL1, CXCL2, CXCL4, CXCL12, CXCL13, CXCR3, cMet, CTLA4, DLL3, DLL4, DNGR-1, E-cadherin, EGFR, ENTPD1, EpCAM, FCER1, FCER1A, FCER2, FGFR, FLAP, FOLH1, Gi24, GITR, GITRL, GPR5, GP100, GPRC5D, HER2, HER3, ICOSL, ICOS, HHLA2, HMGB1, HVEM, IDO, IFNa, IgE, IGF1R, IL2Rbeta, IL1, ILIA, IL1B, IL1F10, IL2, IL4, IL4Ra, IL5, IL5R, IL6, IL7, IL7Ra, IL8, IL9, IL9R, IL10, rhIL1O, IL12, IL13, IL13Ra1, IL13Ra2, IL15, IL17, IL17Rb, IL18, IL22, IL23, IL25, IL7, IL33, IL35, ITGB4, ITK, KIR, LAG3, LAMP1, leptin, LPFS2, MHC class II, MUC-1, MUC-16, NCR3LG1, NKG2D, NKp46, NTPDase-1, OX40, OX40L, PD-1, PD-L1, PD-L2, PROM1, S152, SIRPalpha, SISP1, SLC, SPG64, ST2, STEAP1, STEAP2, Syk kinase, STEAP1, TROP2, TACI, TDO, TGFBETA, T14, TIGIT, TIM3, TLR, TLR2, TLR4, TLR5, TLR9, TMEF1, TNFa, TNFRSF7, Tp55, TREM1, TSLP, TSLPR, TWEAK, VEGF, VISTA, Vstm3, or WUCAM. In some aspects, the antigen binding polypeptide has a structure represented by VL1-L1-VL2-L2-VH2-L3-VH1-L4-CH1-L5-CL, wherein VL1, VL2, VH1 and/or VH2 specifically binds to A2AR, APRIL, ATPDase, BAFF, BAFFR, BCMA, BlyS, BTK, BTLA, B7DC, B7H1, B7H2, B7H3, B7H4, B7H5, B7H6, B7H7, B7RP1, B7-4, C3, C5, CCL2, CCL3, CCL4, CCL5, CCL7, CCL8, CCL11, CCL15, CCL17, CCL19, CCL20, CCL21, CCL25 CCR3, CCR4, CD3, CD16A, CD19, CD20, CD24, CD27, CD28, CD30, CD38, CD39, CD40, CD40L, CD47, CD52, CD70, CD80, CD86, CD123, CD133, CD137, CD137L, CD160, CD272, CEACAM5, CLEC9, CLEC91, CRTH2, CSF-1, CSF-2, CSF-3, CXCL1, CXCL2, CXCL4, CXCL12, CXCL13, CXCR3, cMet, CTLA4, DLL3, DLL4, DNGR-1, E-cadherin, EGFR, ENTPD1, EpCAM, FCER1, FCER1A, FCER2, FGFR, FLAP, FOLH1, Gi24, GITR, GITRL, GPR5, GP100, GPRC5D, HER2, HER3, ICOSL, ICOS, HHLA2, HMGB1, HVEM, IDO, IFNa, IgE, IGF1R, IL2Rbeta, IL1, ILIA, IL1B, IL1F10, IL2, IL4, IL4Ra, IL5, IL5R, IL6, IL7, IL7Ra, IL8, IL9, IL9R, IL10, rhIL1O, IL12, IL13, IL13Ra1, IL13Ra2, IL15, IL17, IL17Rb, IL18, IL22, IL23, IL25, IL7, IL33, IL35, ITGB4, ITK, KIR, LAG3, LAMP1, leptin, LPFS2, MHC class II, MUC-1, MUC-16, NCR3LG1, NKG2D, NKp46, NTPDase-1, OX40, OX40L, PD-1, PD-L1, PD-L2, PROM1, S152, SIRPalpha, SISP1, SLC, SPG64, ST2, STEAP1, STEAP2, Syk kinase, STEAP1, TROP2, TACI, TDO, TGFBETA, T14, TIGIT, TIM3, TLR, TLR2, TLR4, TLR5, TLR9, TMEF1, TNFa, TNFRSF7, Tp55, TREM1, TSLP, TSLPR, TWEAK, VEGF, VISTA, Vstm3, or WUCAM. In some aspects, the antigen binding polypeptide has a structure represented by VH1-L1-VH2-L2-VL2-L3-VL1-L4-CH1-L5-CL, wherein VL1, VL2, VH1 and/or VH2 specifically binds to A2AR, APRIL, ATPDase, BAFF, BAFFR, BCMA, BlyS, BTK, BTLA, B7DC, B7H1, B7H2, B7H3, B7H4, B7H5, B7H6, B7H7, B7RP1, B7-4, C3, C5, CCL2, CCL3, CCL4, CCL5, CCL7, CCL8, CCL11, CCL15, CCL17, CCL19, CCL20, CCL21, CCL25 CCR3, CCR4, CD3, CD16A, CD19, CD20, CD24, CD27, CD28, CD30, CD38, CD39, CD40, CD40L, CD47, CD52, CD70, CD80, CD86, CD123, CD133, CD137, CD137L, CD160, CD272, CEACAM5, CLEC9, CLEC91, CRTH2, CSF-1, CSF-2, CSF-3, CXCL1, CXCL2, CXCL4, CXCL12, CXCL13, CXCR3, cMet, CTLA4, DLL3, DLL4, DNGR-1, E-cadherin, EGFR, ENTPD1, EpCAM, FCER1, FCER1A, FCER2, FGFR, FLAP, FOLH1, Gi24, GITR, GITRL, GPR5, GP100, GPRC5D, HER2, HER3, ICOSL, ICOS, HHLA2, HMGB1, HVEM, IDO, IFNa, IgE, IGF1R, IL2Rbeta, IL1, ILIA, IL1B, IL1F10, IL2, IL4, IL4Ra, IL5, IL5R, IL6, IL7, IL7Ra, IL8, IL9, IL9R, IL10, rhIL1O, IL12, IL13, IL13Ra1, IL13Ra2, IL15, IL17, IL17Rb, IL18, IL22, IL23, IL25, IL7, IL33, IL35, ITGB4, ITK, KIR, LAG3, LAMP1, leptin, LPFS2, MHC class II, MUC-1, MUC-16, NCR3LG1, NKG2D, NKp46, NTPDase-1, OX40, OX40L, PD-1, PD-L1, PD-L2, PROM1, S152, SIRPalpha, SISP1, SLC, SPG64, ST2, STEAP1, STEAP2, Syk kinase, STEAP1, TROP2, TACI, TDO, TGFBETA, T14, TIGIT, TIM3, TLR, TLR2, TLR4, TLR5, TLR9, TMEF1, TNFa, TNFRSF7, Tp55, TREM1, TSLP, TSLPR, TWEAK, VEGF, VISTA, Vstm3, or WUCAM. In some aspects, the antigen binding polypeptide has a structure represented by VL1-L1-VL2-L2-VH2-L3-VH1-L4-CL-L5-CH1, wherein VL1, VL2, VH1 and/or VH2 specifically binds to A2AR, APRIL, ATPDase, BAFF, BAFFR, BCMA, BlyS, BTK, BTLA, B7DC, B7H1, B7H2, B7H3, B7H4, B7H5, B7H6, B7H7, B7RP1, B7-4, C3, C5, CCL2, CCL3, CCL4, CCL5, CCL7, CCL8, CCL11, CCL15, CCL17, CCL19, CCL20, CCL21, CCL25 CCR3, CCR4, CD3, CD16A, CD19, CD20, CD24, CD27, CD28, CD30, CD38, CD39, CD40, CD40L, CD47, CD52, CD70, CD80, CD86, CD123, CD133, CD137, CD137L, CD160, CD272, CEACAM5, CLEC9, CLEC91, CRTH2, CSF-1, CSF-2, CSF-3, CXCL1, CXCL2, CXCL4, CXCL12, CXCL13, CXCR3, cMet, CTLA4, DLL3, DLL4, DNGR-1, E-cadherin, EGFR, ENTPD1, EpCAM, FCER1, FCER1A, FCER2, FGFR, FLAP, FOLH1, Gi24, GITR, GITRL, GPR5, GP100, GPRC5D, HER2, HER3, ICOSL, ICOS, HHLA2, HMGB1, HVEM, IDO, IFNa, IgE, IGF1R, IL2Rbeta, IL1, ILIA, IL1B, IL1F10, IL2, IL4, IL4Ra, IL5, IL5R, IL6, IL7, IL7Ra, IL8, IL9, IL9R, IL10, rhIL1O, IL12, IL13, IL13Ra1, IL13Ra2, IL15, IL17, IL17Rb, IL18, IL22, IL23, IL25, IL7, IL33, IL35, ITGB4, ITK, KIR, LAG3, LAMP1, leptin, LPFS2, MHC class II, MUC-1, MUC-16, NCR3LG1, NKG2D, NKp46, NTPDase-1, OX40, OX40L, PD-1, PD-L1, PD-L2, PROM1, S152, SIRPalpha, SISP1, SLC, SPG64, ST2, STEAP1, STEAP2, Syk kinase, STEAP1, TROP2, TACI, TDO, TGFBETA, T14, TIGIT, TIM3, TLR, TLR2, TLR4, TLR5, TLR9, TMEF1, TNFa, TNFRSF7, Tp55, TREM1, TSLP, TSLPR, TWEAK, VEGF, VISTA, Vstm3, or WUCAM. In some aspects, the antigen binding polypeptide has a structure represented by VH1-L1-VH2-L2-VL2-L3-VL1-L4-CL-L5-CH1, wherein VL1, VL2, VH1 and/or VH2 specifically binds to A2AR, APRIL, ATPDase, BAFF, BAFFR, BCMA, BlyS, BTK, BTLA, B7DC, B7H1, B7H2, B7H3, B7H4, B7H5, B7H6, B7H7, B7RP1, B7-4, C3, C5, CCL2, CCL3, CCL4, CCL5, CCL7, CCL8, CCL11, CCL15, CCL17, CCL19, CCL20, CCL21, CCL25 CCR3, CCR4, CD3, CD16A, CD19, CD20, CD24, CD27, CD28, CD30, CD38, CD39, CD40, CD40L, CD47, CD52, CD70, CD80, CD86, CD123, CD133, CD137, CD137L, CD160, CD272, CEACAM5, CLEC9, CLEC91, CRTH2, CSF-1, CSF-2, CSF-3, CXCL1, CXCL2, CXCL4, CXCL12, CXCL13, CXCR3, cMet, CTLA4, DLL3, DLL4, DNGR-1, E-cadherin, EGFR, ENTPD1, EpCAM, FCER1, FCER1A, FCER2, FGFR, FLAP, FOLH1, Gi24, GITR, GITRL, GPR5, GP100, GPRC5D, HER2, HER3, ICOSL, ICOS, HHLA2, HMGB1, HVEM, IDO, IFNa, IgE, IGF1R, IL2Rbeta, IL1, ILIA, IL1B, IL1F10, IL2, IL4, IL4Ra, IL5, IL5R, IL6, IL7, IL7Ra, IL8, IL9, IL9R, IL10, rhIL1O, IL12, IL13, IL13Ra1, IL13Ra2, IL15, IL17, IL17Rb, IL18, IL22, IL23, IL25, IL7, IL33, IL35, ITGB4, ITK, KIR, LAG3, LAMP1, leptin, LPFS2, MHC class II, MUC-1, MUC-16, NCR3LG1, NKG2D, NKp46, NTPDase-1, OX40, OX40L, PD-1, PD-L1, PD-L2, PROM1, S152, SIRPalpha, SISP1, SLC, SPG64, ST2, STEAP1, STEAP2, Syk kinase, STEAP1, TROP2, TACI, TDO, TGFBETA, T14, TIGIT, TIM3, TLR, TLR2, TLR4, TLR5, TLR9, TMEF1, TNFa, TNFRSF7, Tp55, TREM1, TSLP, TSLPR, TWEAK, VEGF, VISTA, Vstm3, or WUCAM. Any and all disclosure herein in relation to targets for antigen binding polypeptides of the invention is generally applicable, and applies equally and without reservation to each and every antigen binding polypeptide and antigen binding polypeptide complex described herein. For the avoidance of doubt, the VL1, VL2, VH1, and/or VH2 of each and every antigen binding polypeptide and antigen binding polypeptide complex described herein may independently bind to any one of said particularly preferred targets.

[0160] In some aspects, the antigen binding polypeptide complex comprises a first polypeptide and a second polypeptide; wherein the first polypeptide has a structure represented by: VL1-VL2-VH2-VH1-CH1; VH1-VH2-VL2-VL1-CH1; VL1-VL2-VH2-VH1-CL; VH1-VH2-VL2-VL1-CL; VL1-VL2-VH2-VH1-CH1-CL; VH1-VH2-VL2-VL1-CH1-CL; VL1-VL2-VH2-VH1-CL-CH1; VH1-VH2-VL2-VL1-CL-CH1; VL1-L1-VL2-L2-VH2-L3-VH1-L4-CH1; VH1-L1-VH2-L2-VL2-L3-VL1-L4-CH1; VL1-L1-VL2-L2-VH2-L3-VH1-L4-CL; VH1-L1-VH2-L2-VL2-L3-VL1-L4-CL; VL1-L1-VL2-L2-VH2-L3-VH1-L4-CH1-L5-CL; VH1-L1-VH2-L2-VL2-L3-VL1-L4-CH1-L5-CL; VL1-L1-VL2-L2-VH2-L3-VH1-L4-CL-L5-CH1; or VH1-L1-VH2-L2-VL2-L3-VL1-L4-CL-L5-CH1; wherein the second polypeptide has a structure represented by VL1-VL2-VH2-VH1-CH1; VL1-VL2-VH2-VH1-CH1; VH1-VH2-VL2-VL1-CH1; VL1-VL2-VH2-VH1-CL; VH1-VH2-VL2-VL1-CL; VL1-VL2-VH2-VH1-CH1-CL; VH1-VH2-VL2-VL1-CH1-CL; VL1-VL2-VH2-VH1-CL-CH1; VH1-VH2-VL2-VL1-CL-CH1; VL1-L1-VL2-L2-VH2-L3-VH1-L4-CH1; VH1-L1-VH2-L2-VL2-L3-VL1-L4-CH1; VL1-L1-VL2-L2-VH2-L3-VH1-L4-CL; VH1-L1-VH2-L2-VL2-L3-VL1-L4-CL; VL1-L1- VL2-L2-VH2-L3-VH1-L4-CH1-L5-CL; VH1-L1-VH2-L2-VL2-L3-VL1-L4-CH1-L5-CL; VL1-L1-VL2-L2-VH2-L3- VH1-L4-CL-L5-CH1; or VH1-L1-VH2-L2-VL2-L3-VL1-L4-CL-L5-CH1; wherein VL1 is a first immunoglobulin light chain variable region that specifically binds to A2AR, APRIL, ATPDase, BAFF, BAFFR, BCMA, BlyS, BTK, BTLA, B7DC, B7H1, B7H2, B7H3, B7H4, B7H5, B7H6, B7H7, B7RP1, B7-4, C3, C5, CCL2, CCL3, CCL4, CCLS, CCL7, CCL8, CCL11, CCL15, CCL17, CCL19, CCL20, CCL21, CCL25 CCR3, CCR4, CD3, CD16A, CD19, CD20, CD24, CD27, CD28, CD30, CD38, CD39, CD40, CD40L, CD47, CD52, CD70, CD80, CD86, CD123, CD133, CD137, CD137L, CD160, CD272, CEACAM5, CLEC9, CLEC91, CRTH2, CSF-1, CSF-2, CSF-3, CXCL1, CXCL2, CXCL4, CXCL12, CXCL13, CXCR3, cMet, CTLA4, DLL3, DLL4, DNGR-1, E-cadherin, EGFR, ENTPD1, EpCAM, FCER1, FCER1A, FCER2, FGFR, FLAP, FOLH1, Gi24, GITR, GITRL, GPR5, GP100, GPRC5D, HER2, HER3, ICOSL, ICOS, HHLA2, HMGB1, HVEM, IDO, IFNa, IgE, IGF1R, IL2Rbeta, IL1, ILIA, IL1B, IL1F10, IL2, IL4, IL4Ra, IL5, IL5R, IL6, IL7, IL7Ra, IL8, IL9, IL9R, IL10, rhIL1O, IL12, IL13, IL13Ra1, IL13Ra2, IL15, IL17, IL17Rb, IL18, IL22, IL23, IL25, IL7, IL33, IL35, ITGB4, ITK, KIR, LAG3, LAMP1, leptin, LPFS2, MHC class II, MUC-1, MUC-16, NCR3LG1, NKG2D, NKp46, NTPDase-1, OX40, OX40L, PD-1, PD-L1, PD-L2, PROM1, S152, SIRPalpha, SISP1, SLC, SPG64, ST2, STEAP1, STEAP2, Syk kinase, STEAP1, TROP2, TACI, TDO, TGFBETA, T14, TIGIT, TIM3, TLR, TLR2, TLR4, TLR5, TLR9, TMEF1, TNFa, TNFRSF7, Tp55, TREM1, TSLP, TSLPR, TWEAK, VEGF, VISTA, Vstm3, or WUCAM; VL2 is a second immunoglobulin light chain variable region that specifically binds to A2AR, APRIL, ATPDase, BAFF, BAFFR, BCMA, BlyS, BTK, BTLA, B7DC, B7H1, B7H2, B7H3, B7H4, B7H5, B7H6, B7H7, B7RP1, B7-4, C3, C5, CCL2, CCL3, CCL4, CCL5, CCL7, CCL8, CCL11, CCL15, CCL17, CCL19, CCL20, CCL21, CCL25 CCR3, CCR4, CD3, CD16A, CD19, CD20, CD24, CD27, CD28, CD30, CD38, CD39, CD40, CD40L, CD47, CD52, CD70, CD80, CD86, CD123, CD133, CD137, CD137L, CD160, CD272, CEACAM5, CLEC9, CLEC91, CRTH2, CSF-1, CSF-2, CSF-3, CXCL1, CXCL2, CXCL4, CXCL12, CXCL13, CXCR3, cMet, CTLA4, DLL3, DLL4, DNGR-1, E-cadherin, EGFR, ENTPD1, EpCAM, FCER1, FCER1A, FCER2, FGFR, FLAP, FOLH1, Gi24, GITR, GITRL, GPR5, GP100, GPRC5D, HER2, HER3, ICOSL, ICOS, HHLA2, HMGB1, HVEM, IDO, IFNa, IgE, IGF1R, IL2Rbeta, IL1, ILIA, IL1B, IL1F10, IL2, IL4, IL4Ra, IL5, IL5R, IL6, IL7, IL7Ra, IL8, IL9, IL9R, IL10, rhIL1O, IL12, IL13, IL13Ra1, IL13Ra2, IL15, IL17, IL17Rb, IL18, IL22, IL23, IL25, IL7, IL33, IL35, ITGB4, ITK, KIR, LAG3, LAMP1, leptin, LPFS2, MHC class II, MUC-1, MUC-16, NCR3LG1, NKG2D, NKp46, NTPDase-1, OX40, OX40L, PD-1, PD-L1, PD-L2, PROM1, S152, SIRPalpha, SISP1, SLC, SPG64, ST2, STEAP1, STEAP2, Syk kinase, STEAP1, TROP2, TACI, TDO, TGFBETA, T14, TIGIT, TIM3, TLR, TLR2, TLR4, TLR5, TLR9, TMEF1, TNFa, TNFRSF7, Tp55, TREM1, TSLP, TSLPR, TWEAK, VEGF, VISTA, Vstm3, or WUCAM; VH1 is a first immunoglobulin heavy chain variable region that specifically binds to A2AR, APRIL, ATPDase, BAFF, BAFFR, BCMA, BlyS, BTK, BTLA, B7DC, B7H1, B7H2, B7H3, B7H4, B7H5, B7H6, B7H7, B7RP1, B7-4, C3, C5, CCL2, CCL3, CCL4, CCL5, CCL7, CCL8, CCL11, CCL15, CCL17, CCL19, CCL20, CCL21, CCL25 CCR3, CCR4, CD3, CD16A, CD19, CD20, CD24, CD27, CD28, CD30, CD38, CD39, CD40, CD40L, CD47, CD52, CD70, CD80, CD86, CD123, CD133, CD137, CD137L, CD160, CD272, CEACAM5, CLEC9, CLEC91, CRTH2, CSF-1, CSF-2, CSF-3, CXCL1, CXCL2, CXCL4, CXCL12, CXCL13, CXCR3, cMet, CTLA4, DLL3, DLL4, DNGR-1, E-cadherin, EGFR, ENTPD1, EpCAM, FCER1, FCER1A, FCER2, FGFR, FLAP, FOLH1, Gi24, GITR, GITRL, GPR5, GP100, GPRC5D, HER2, HER3, ICOSL, ICOS, HHLA2, HMGB1, HVEM, IDO, IFNa, IgE, IGF1R, IL2Rbeta, IL1, ILIA, IL1B, IL1F10, IL2, IL4, IL4Ra, IL5, IL5R, IL6, IL7, IL7Ra, IL8, IL9, IL9R, IL10, rhIL1O, IL12, IL13, IL13Ra1, IL13Ra2, IL15, IL17, IL17Rb, IL18, IL22, IL23, IL25, IL7, IL33, IL35, ITGB4, ITK, KIR, LAG3, LAMP1, leptin, LPFS2, MHC class II, MUC-1, MUC-16, NCR3LG1, NKG2D, NKp46, NTPDase-1, OX40, OX40L, PD-1, PD-L1, PD-L2, PROM1, S152, SIRPalpha, SISP1, SLC, SPG64, ST2, STEAP1, STEAP2, Syk kinase, STEAP1, TROP2, TACI, TDO, TGFBETA, T14, TIGIT, TIM3, TLR, TLR2, TLR4, TLR5, TLR9, TMEF1, TNFa, TNFRSF7, Tp55, TREM1, TSLP, TSLPR, TWEAK, VEGF, VISTA, Vstm3, or WUCAM; VH2 is a second immunoglobulin heavy chain variable region that specifically binds to A2AR, APRIL, ATPDase, BAFF, BAFFR, BCMA, BlyS, BTK, BTLA, B7DC, B7H1, B7H2, B7H3, B7H4, B7H5, B7H6, B7H7, B7RP1, B7-4, C3, C5, CCL2, CCL3, CCL4, CCL5, CCL7, CCL8, CCL11, CCL15, CCL17, CCL19, CCL20, CCL21, CCL25 CCR3, CCR4, CD3, CD16A, CD19, CD20, CD24, CD27, CD28, CD30, CD38, CD39, CD40, CD40L, CD47, CD52, CD70, CD80, CD86, CD123, CD133, CD137, CD137L, CD160, CD272, CEACAM5, CLEC9, CLEC91, CRTH2, CSF-1, CSF-2, CSF-3, CXCL1, CXCL2, CXCL4, CXCL12, CXCL13, CXCR3, cMet, CTLA4, DLL3, DLL4, DNGR-1, E-cadherin, EGFR, ENTPD1, EpCAM, FCER1, FCER1A, FCER2, FGFR, FLAP, FOLH1, Gi24, GITR, GITRL, GPR5, GP100, GPRC5D, HER2, HER3, ICOSL, ICOS, HHLA2, HMGB1, HVEM, IDO, IFNa, IgE, IGF1R, IL2Rbeta, IL1, ILIA, IL1B, IL1F10, IL2, IL4, IL4Ra, IL5, IL5R, IL6, IL7, IL7Ra, IL8, IL9, IL9R, IL10, rhIL1O, IL12, IL13, IL13Ra1, IL13Ra2, IL15, IL17, IL17Rb, IL18, IL22, IL23, IL25, IL7, IL33, IL35, ITGB4, ITK, KIR, LAG3, LAMP1, leptin, LPFS2, MHC class II, MUC-1, MUC-16, NCR3LG1, NKG2D, NKp46, NTPDase-1, OX40, OX40L, PD-1, PD-L1, PD-L2, PROM1, S152, SIRPalpha, SISP1, SLC, SPG64, ST2, STEAP1, STEAP2, Syk kinase, STEAP1, TROP2, TACI, TDO, TGFBETA, T14, TIGIT, TIM3, TLR, TLR2, TLR4, TLR5, TLR9, TMEF1, TNFa, TNFRSF7, Tp55, TREM1, TSLP, TSLPR, TWEAK, VEGF, VISTA, Vstm3, or WUCAM; CH1 is an immunoglobulin heavy chain constant region 1; CL is an immunoglobulin light chain constant region; and L1, L2, L3, L4 and L5 are amino acid linkers. In some aspects, the first polypeptide has a structure represented by VL1-VL2-VH2-VH1-CH1 and the second polypeptide has a structure represented by VL1-VL2-VH2-VH1-CH1; VL1-VL2-VH2-VH1-CH1; VH1-VH2-VL2-VL1-CH1; VL1-VL2-VH2-VH1-CL; VH1-VH2-VL2-VL1-CL; VL1-VL2-VH2-VH1-CH1-CL; VH1-VH2-VL2-VL1-CH1-CL; VL1-VL2-VH2-VH1-CL-CH1; VH1-VH2-VL2-VL1-CL-CH1; VL1-L1-VL2-L2-VH2-L3-VH1-L4-CH1; VH1-L1-VH2-L2-VL2-L3-VL1-L4-CH1; VL1-L1-VL2-L2-VH2-L3-VH1-L4-CL; VH1-L1-VH2-L2-VL2-L3-VL1-L4-CL; VL1-L1-VL2- L2-VH2-L3-VH1-L4-CH1-L5-CL; VH1-L1-VH2-L2-VL2-L3-VL1-L4-CH1-L5-CL; VL1-L1-VL2-L2-VH2-L3-VH1- L4-CL-L5-CH1; or VH1-L1-VH2-L2-VL2-L3-VL1-L4-CL-L5-CH1. In some aspects, the first polypeptide has a structure represented by VH1-VH2-VL2-VL1-CH1 and the second polypeptide has a structure represented by VL1-VL2-VH2-VH1-CH1; VL1-VL2-VH2-VH1-CH1; VH1-VH2-VL2-VL1-CH1; VL1-VL2-VH2-VH1-CL; VH1-VH2-VL2-VL1-CL; VL1-VL2-VH2-VH1-CH1-CL; VH1-VH2-VL2-VL1-CH1-CL; VL1-VL2-VH2-VH1-CL-CH1; VH1-VH2-VL2-VL1-CL-CH1; VL1-L1-VL2-L2-VH2-L3-VH1-L4-CH1; VH1-L1-VH2-L2-VL2-L3-VL1-L4-CH1; VL1-L1-VL2-L2- VH2-L3-VH1-L4-CL; VH1-L1-VH2-L2-VL2-L3-VL1-L4-CL; VL1-L1-VL2-L2-VH2-L3-VH1-L4-CH1-L5-CL; VH1-L1-VH2-L2-VL2-L3-VL1-L4-CH1-L5-CL; VL1-L1-VL2-L2-VH2-L3-VH1-L4-CL-L5-CH1; or VH1-L1-VH2-L2-VL2-L3-VL1-L4-CL-L5-CH1. In some aspects, the first polypeptide has a structure represented by VL1-VL2-VH2-VH1-CL and the second polypeptide has a structure represented by VL1-VL2-VH2-VH1-CH1; VL1-VL2-VH2-VH1-CH1; VH1-VH2-VL2-VL1-CH1; VL1-VL2-VH2-VH1-CL; VH1-VH2-VL2-VL1-CL; VL1-VL2-VH2-VH1-CH1-CL; VH1-VH2-VL2-VL1-CH1-CL; VL1-VL2-VH2-VH1-CL-CH1; VH1-VH2-VL2-VL1-CL-CH1; VL1-L1-VL2-L2-VH2-L3-VH1-L4-CH1; VH1-L1-VH2-L2-VL2-L3-VL1-L4-CH1; VL1-L1-VL2-L2-VH2-L3-VH1-L4-CL; VH1-L1-VH2-L2- VL2-L3-VL1-L4-CL; VL1-L1-VL2-L2-VH2-L3-VH1-L4-CH1-L5-CL; VH1-L1-VH2-L2-VL2-L3-VL1-L4-CH1-L5-CL; VL1-L1-VL2-L2-VH2-L3-VH1-L4-CL-L5-CH1; or VH1-L1-VH2-L2-VL2-L3-VL1-L4-CL-L5-CH1. In some aspects, the first polypeptide has a structure represented by VH1-VH2-VL2-VL1-CL and the second polypeptide has a structure represented by VL1-VL2-VH2-VH1-CH1; VL1-VL2-VH2-VH1-CH1; VH1-VH2-VL2-VL1-CH1; VL1-VL2-VH2-VH1-CL; VH1-VH2-VL2-VL1-CL; VL1-VL2-VH2-VH1-CH1-CL; VH1-VH2-VL2-VL1-CH1-CL; VL1-VL2-VH2-VH1-CL-CH1; VH1-VH2-VL2-VL1-CL-CH1; VL1-L1-VL2-L2-VH2-L3-VH1-L4-CH1; VH1-L1-VH2-L2-VL2-L3-VL1-L4-CH1; VL1-L1-VL2-L2-VH2-L3-VH1-L4-CL; VH1-L1-VH2-L2-VL2-L3-VL1-L4-CL; VL1-L1-VL2-L2- VH2-L3-VH1-L4-CH1-L5-CL; VH1-L1-VH2-L2-VL2-L3-VL1-L4-CH1-L5-CL; VL1-L1-VL2-L2-VH2-L3-VH1-L4- CL-L5-CH1; or VH1-L1-VH2-L2-VL2-L3-VL1-L4-CL-L5-CH1. In some aspects, the first polypeptide has a structure represented by VL1-VL2-VH2-VH1-CH1-CL and the second polypeptide has a structure represented by VL1-VL2-VH2-VH1-CH1; VL1-VL2-VH2-VH1-CH1; VH1-VH2-VL2-VL1-CH1; VL1-VL2-VH2-VH1-CL; VH1-VH2-VL2-VL1-CL; VL1-VL2-VH2-VH1-CH1-CL; VH1-VH2-VL2-VL1-CH1-CL; VL1-VL2-VH2-VH1-CL-CH1; VH1-VH2-VL2-VL1-CL-CH1; VL1-L1-VL2-L2-VH2-L3-VH1-L4-CH1; VH1-L1-VH2-L2-VL2-L3-VL1-L4-CH1; VL1-L1- VL2-L2-VH2-L3-VH1-L4-CL; VH1-L1-VH2-L2-VL2-L3-VL1-L4-CL; VL1-L1-VL2-L2-VH2-L3-VH1-L4-CH1-L5- CL; VH1-L1-VH2-L2-VL2-L3-VL1-L4-CH1-L5-CL; VL1-L1-VL2-L2-VH2-L3-VH1-L4-CL-L5-CH1; or VH1-L1-VH2-L2-VL2-L3-VL1-L4-CL-L5-CH1. In some aspects, the first polypeptide has a structure represented by VH1-VH2-VL2-VL1-CH1-CL and the second polypeptide has a structure represented by VL1-VL2-VH2-VH1-CH1; VL1-VL2-VH2-VH1-CH1; VH1-VH2-VL2-VL1-CH1; VL1-VL2-VH2-VH1-CL; VH1-VH2-VL2-VL1-CL; VL1-VL2-VH2-VH1-CH1-CL; VH1-VH2-VL2-VL1-CH1-CL; VL1-VL2-VH2-VH1-CL-CH1; VH1-VH2-VL2-VL1-CL-CH1; VL1-L1-VL2-L2-VH2-L3-VH1-L4-CH1; VH1-L1-VH2-L2-VL2-L3-VL1-L4-CH1; VL1-L1-VL2-L2-VH2-L3-VH1-L4-CL; VH1- L1-VH2-L2-VL2-L3-VL1-L4-CL; VL1-L1-VL2-L2-VH2-L3-VH1-L4-CH1-L5-CL; VH1-L1-VH2-L2-VL2-L3-VL1- L4-CH1-L5-CL; VL1-L1-VL2-L2-VH2-L3-VH1-L4-CL-L5-CH1; or VH1-L1-VH2-L2-VL2-L3-VL1-L4-CL-L5-CH1. In some aspects, the first polypeptide has a structure represented by VL1-VL2-VH2-VH1-CL-CH1 and the second polypeptide has a structure represented by VL1-VL2-VH2-VH1-CH1; VL1-VL2-VH2-VH1-CH1; VH1-VH2-VL2-VL1-CH1; VL1-VL2-VH2-VH1-CL; VH1-VH2-VL2-VL1-CL; VL1-VL2-VH2-VH1-CH1-CL; VH1-VH2-VL2-VL1-CH1-CL; VL1-VL2-VH2-VH1-CL-CH1; VH1-VH2-VL2-VL1-CL-CH1; VL1-L1-VL2-L2-VH2-L3-VH1-L4-CH1; VH1-L1-VH2-L2-VL2-L3-VL1-L4-CH1; VL1-L1-VL2-L2-VH2-L3-VH1-L4-CL; VH1-L1-VH2-L2-VL2-L3-VL1-L4-CL; VL1-L1-VL2-L2-VH2-L3-VH1-L4-CH1-L5-CL; VH1-L1-VH2-L2-VL2-L3-VL1-L4-CH1-L5-CL; VL1-L1-VL2-L2- VH2-L3-VH1-L4-CL-L5-CH1; or VH1-L1-VH2-L2-VL2-L3-VL1-L4-CL-L5-CH1. In some aspects, the first polypeptide has a structure represented by VH1-VH2-VL2-VL1-CL-CH1 and the second polypeptide has a structure represented by VL1-VL2-VH2-VH1-CH1; VL1-VL2-VH2-VH1-CH1; VH1-VH2-VL2-VL1-CH1; VL1-VL2-VH2-VH1-CL; VH1-VH2-VL2-VL1-CL; VL1-VL2-VH2-VH1-CH1-CL; VH1-VH2-VL2-VL1-CH1-CL; VL1-VL2-VH2-VH1-CL-CH1; VH1-VH2-VL2-VL1-CL-CH1; VL1-L1-VL2-L2-VH2-L3-VH1-L4-CH1; VH1-L1-VH2-L2-VL2-L3-VL1-L4-CH1; VL1-L1-VL2-L2-VH2-L3-VH1-L4-CL; VH1-L1-VH2-L2-VL2-L3-VL1-L4-CL; VL1-L1-VL2-L2-VH2-L3-VH1- L4-CH1-L5-CL; VH1-L1-VH2-L2-VL2-L3-VL1-L4-CH1-L5-CL; VL1-L1-VL2-L2-VH2-L3-VH1-L4-CL-L5-CH1; or VH1-L1-VH2-L2-VL2-L3-VL1-L4-CL-L5-CH1. In some aspects, the first polypeptide has a structure represented by VL1-L1-VL2-L2-VH2-L3-VH1-L4-CH1 and the second polypeptide has a structure represented by VL1-VL2-VH2-VH1-CH1; VL1-VL2-VH2-VH1-CH1; VH1-VH2-VL2-VL1-CH1; VL1-VL2-VH2-VH1-CL; VH1-VH2-VL2-VL1-CL; VL1-VL2-VH2-VH1-CH1-CL; VH1-VH2-VL2-VL1-CH1-CL; VL1-VL2-VH2-VH1-CL-CH1; VH1-VH2-VL2-VL1-CL-CH1; VL1-L1-VL2-L2-VH2-L3-VH1-L4-CH1; VH1-L1-VH2-L2-VL2-L3-VL1-L4-CH1; VL1-L1-VL2-L2- VH2-L3-VH1-L4-CL; VH1-L1-VH2-L2-VL2-L3-VL1-L4-CL; VL1-L1-VL2-L2-VH2-L3-VH1-L4-CH1-L5-CL; VH1-L1-VH2-L2-VL2-L3-VL1-L4-CH1-L5-CL; VL1-L1-VL2-L2-VH2-L3-VH1-L4-CL-L5-CH1; or VH1-L1-VH2-L2-VL2-L3-VL1-L4-CL-L5-CH1. In some aspects, the first polypeptide has a structure represented by VH1-L1-VH2-L2-VL2-L3-VL1-L4-CH1 and the second polypeptide has a structure represented by VL1-VL2-VH2-VH1-CH1; VL1-VL2-VH2-VH1-CH1; VH1-VH2-VL2-VL1-CH1; VL1-VL2-VH2-VH1-CL; VH1-VH2-VL2-VL1-CL; VL1-VL2-VH2-VH1-CH1-CL; VH1-VH2-VL2-VL1-CH1-CL; VL1-VL2-VH2-VH1-CL-CH1; VH1-VH2-VL2-VL1-CL-CH1; VL1-L1-VL2-L2-VH2-L3-VH1-L4-CH1; VH1-L1-VH2-L2-VL2-L3-VL1-L4-CH1; VL1-L1-VL2-L2-VH2-L3-VH1-L4-CL; VH1- L1-VH2-L2-VL2-L3-VL1-L4-CL; VL1-L1-VL2-L2-VH2-L3-VH1-L4-CH1-L5-CL; VH1-L1-VH2-L2-VL2-L3-VL1- L4-CH1-L5-CL; VL1-L1-VL2-L2-VH2-L3-VH1-L4-CL-L5-CH1; or VH1-L1-VH2-L2-VL2-L3-VL1-L4-CL-L5-CH1. In some aspects, the first polypeptide has a structure represented by VL1-L1-VL2-L2-VH2-L3-VH1-L4-CL and the second polypeptide has a structure represented by VL1-VL2-VH2-VH1-CH1; VL1-VL2-VH2-VH1-CH1; VH1-VH2-VL2-VL1-CH1; VL1-VL2-VH2-VH1-CL; VH1-VH2-VL2-VL1-CL; VL1-VL2-VH2-VH1-CH1-CL; VH1-VH2-VL2-VL1-CH1-CL; VL1-VL2-VH2-VH1-CL-CH1; VH1-VH2-VL2-VL1-CL-CH1; VL1-L1-VL2-L2-VH2-L3-VH1-L4-CH1; VH1-L1-VH2-L2-VL2-L3-VL1-L4-CH1; VL1-L1-VL2-L2-VH2-L3-VH1-L4-CL; VH1-L1-VH2-L2-VL2-L3-VL1-L4-CL; VL1-L1-VL2-L2-VH2-L3-VH1-L4-CH1-L5-CL; VH1-L1-VH2-L2-VL2-L3-VL1-L4-CH1-L5-CL; VL1-L1-VL2-L2- VH2-L3-VH1-L4-CL-L5-CH1; or VH1-L1-VH2-L2-VL2-L3-VL1-L4-CL-L5-CH1. In some aspects, the first polypeptide has a structure represented by VH1-L1-VH2-L2-VL2-L3-VL1-L4-CL and the second polypeptide has a structure represented by VL1-VL2-VH2-VH1-CH1; VL1-VL2-VH2-VH1-CH1; VH1-VH2-VL2-VL1-CH1; VL1-VL2-VH2-VH1-CL; VH1-VH2-VL2-VL1-CL; VL1-VL2-VH2-VH1-CH1-CL; VH1-VH2-VL2-VL1-CH1-CL; VL1-VL2-VH2-VH1-CL-CH1; VH1-VH2-VL2-VL1-CL-CH1; VL1-L1-VL2-L2-VH2-L3-VH1-L4-CH1; VH1-L1-VH2-L2-VL2-L3-VL1-L4-CH1; VL1-L1-VL2-L2-VH2-L3-VH1-L4-CL; VH1-L1-VH2-L2-VL2-L3-VL1-L4-CL; VL1-L1-VL2-L2-VH2-L3-VH1- L4-CH1-L5-CL; VH1-L1-VH2-L2-VL2-L3-VL1-L4-CH1-L5-CL; VL1-L1-VL2-L2-VH2-L3-VH1-L4-CL-L5-CH1; or VH1-L1-VH2-L2-VL2-L3-VL1-L4-CL-L5-CH1. In some aspects, the first polypeptide has a structure represented by VL1-L1-VL2-L2-VH2-L3-VH1-L4-CH1-L5-CL and the second polypeptide has a structure represented by VL1-VL2-VH2-VH1-CH1; VL1-VL2-VH2-VH1-CH1; VH1-VH2-VL2-VL1-CH1; VL1-VL2-VH2-VH1-CL; VH1-VH2-VL2-VL1-CL; VL1-VL2-VH2-VH1-CH1-CL; VH1-VH2-VL2-VL1-CH1-CL; VL1-VL2-VH2-VH1-CL-CH1; VH1-VH2-VL2-VL1-CL-CH1; VL1-L1-VL2-L2-VH2-L3-VH1-L4-CH1; VH1-L1-VH2-L2-VL2-L3-VL1-L4-CH1; VL1-L1- VL2-L2-VH2-L3-VH1-L4-CL; VH1-L1-VH2-L2-VL2-L3-VL1-L4-CL; VL1-L1-VL2-L2-VH2-L3-VH1-L4-CH1-L5- CL; VH1-L1-VH2-L2-VL2-L3-VL1-L4-CH1-L5-CL; VL1-L1-VL2-L2-VH2-L3-VH1-L4-CL-L5-CH1; or VH1-L1-VH2-L2-VL2-L3-VL1-L4-CL-L5-CH1. In some aspects, the first polypeptide has a structure represented by VH1-L1-VH2-L2-VL2-L3-VL1-L4-CH1-L5-CL and the second polypeptide has a structure represented by VL1-VL2-VH2-VH1-CH1; VL1-VL2-VH2-VH1-CH1; VH1-VH2-VL2-VL1-CH1; VL1-VL2-VH2-VH1-CL; VH1-VH2-VL2-VL1-CL; VL1-VL2-VH2-VH1-CH1-CL; VH1-VH2-VL2-VL1-CH1-CL; VL1-VL2-VH2-VH1-CL-CH1; VH1-VH2-VL2-VL1-CL-CH1; VL1-L1-VL2-L2-VH2-L3-VH1-L4-CH1; VH1-L1-VH2-L2-VL2-L3-VL1-L4-CH1; VL1-L1-VL2-L2-VH2-L3-VH1-L4-CL; VH1-L1-VH2-L2-VL2-L3-VL1-L4-CL; VL1-L1-VL2-L2-VH2-L3-VH1-L4-CH1-L5-CL; VH1-L1-VH2-L2-VL2-L3-VL1-L4-CH1-L5-CL; VL1-L1-VL2-L2-VH2-L3-VH1-L4-CL-L5-CH1; or VH1-L1-VH2-L2-VL2-L3-VL1-L4-CL-L5-CH1. In some aspects, the first polypeptide has a structure represented by VL1-L1-VL2-L2-VH2-L3-VH1-L4-CL-L5-CH1 and the second polypeptide has a structure represented by VL1-VL2-VH2-VH1-CH1; VL1-VL2-VH2-VH1-CH1; VH1-VH2-VL2-VL1-CH1; VL1-VL2-VH2-VH1-CL; VH1-VH2-VL2-VL1-CL; VL1-VL2-VH2-VH1-CH1-CL; VH1-VH2-VL2-VL1-CH1-CL; VL1-VL2-VH2-VH1-CL-CH1; VH1-VH2-VL2-VL1-CL-CH1; VL1-L1-VL2-L2-VH2-L3-VH1-L4-CH1; VH1-L1-VH2-L2-VL2-L3-VL1-L4-CH1; VL1-L1-VL2-L2-VH2-L3-VH1-L4-CL; VH1- L1-VH2-L2-VL2-L3-VL1-L4-CL; VL1-L1-VL2-L2-VH2-L3-VH1-L4-CH1-L5-CL; VH1-L1-VH2-L2-VL2-L3-VL1- L4-CH1-L5-CL; VL1-L1-VL2-L2-VH2-L3-VH1-L4-CL-L5-CH1; or VH1-L1-VH2-L2-VL2-L3-VL1-L4-CL-L5-CH1. In some aspects, the first polypeptide has a structure represented by VH1-L1-VH2-L2-VL2-L3-VL1-L4-CL-L5-CH1 and the second polypeptide has a structure represented by VL1-VL2-VH2-VH1-CH1; VL1-VL2-VH2-VH1-CH1; VH1-VH2-VL2-VL1-CH1; VL1-VL2-VH2-VH1-CL; VH1-VH2-VL2-VL1-CL; VL1-VL2-VH2-VH1-CH1-CL; VH1-VH2-VL2-VL1-CH1-CL; VL1-VL2-VH2-VH1-CL-CH1; VH1-VH2-VL2-VL1-CL-CH1; VL1-L1-VL2-L2-VH2-L3-VH1-L4-CH1; VH1-L1-VH2-L2-VL2-L3-VL1-L4-CH1; VL1-L1-VL2-L2-VH2-L3-VH1-L4-CL; VH1-L1-VH2-L2- VL2-L3-VL1-L4-CL; VL1-L1-VL2-L2-VH2-L3-VH1-L4-CH1-L5-CL; VH1-L1-VH2-L2-VL2-L3-VL1-L4-CH1-L5-CL; VL1-L1-VL2-L2-VH2-L3-VH1-L4-CL-L5-CH1; or VH1-L1-VH2-L2-VL2-L3-VL1-L4-CL-L5-CH1. The VL1, VL2, VH1, and/or VH2 may specifically bind to A2AR, APRIL, ATPDase, BAFF, BAFFR, BCMA, BlyS, BTK, BTLA, B7DC, B7H1, B7H2, B7H3, B7H4, B7H5, B7H6, B7H7, B7RP1, B7-4, C3, C5, CCL2, CCL3, CCL4, CCLS, CCL7, CCL8, CCL11, CCL15, CCL17, CCL19, CCL20, CCL21, CCL25 CCR3, CCR4, CD3, CD16A, CD19, CD20, CD24, CD27, CD28, CD30, CD38, CD39, CD40, CD40L, CD47, CD52, CD70, CD80, CD86, CD123, CD133, CD137, CD137L, CD160, CD272, CEACAM5, CLEC9, CLEC91, CRTH2, CSF-1, CSF-2, CSF-3, CXCL1, CXCL2, CXCL4, CXCL12, CXCL13, CXCR3, cMet, CTLA4, DLL3, DLL4, DNGR-1, E-cadherin, EGFR, ENTPD1, EpCAM, FCER1, FCER1A, FCER2, FGFR, FLAP, FOLH1, Gi24, GITR, GITRL, GPRS, GP100, GPRC5D, HER2, HER3, ICOSL, ICOS, HHLA2, HMGB1, HVEM, IDO, IFNa, IgE, IGF1R, IL2Rbeta, IL1, ILIA, IL1B, IL1F10, IL2, 114, IL4Ra, IL5, IL5R, IL6, IL7, IL7Ra, IL8, IL9, IL9R, IL10, rhIL1O, IL12, IL13, IL13Ra1, IL13Ra2, IL15, IL17, IL17Rb, IL18, IL22, IL23, IL25, IL7, IL33, IL35, ITGB4, ITK, KIR, LAG3, LAMP1, leptin, LPFS2, MHC class II, MUC-1, MUC-16, NCR3LG1, NKG2D, NKp46, NTPDase-1, OX40, OX40L, PD-1, PD-L1, PD-L2, PROM1, S152, SIRPalpha, SISP1, SLC, SPG64, ST2, STEAP1, STEAP2, Syk kinase, STEAP1, TROP2, TACI, TDO, TGFBETA, T14, TIGIT, TIM3, TLR, TLR2, TLR4, TLR5, TLR9, TMEF1, TNFa, TNFRSF7, Tp55, TREM1, TSLP, TSLPR, TWEAK, VEGF, VISTA, Vstm3, or WUCAM. For the avoidance of doubt, all the antigen binding polypeptide complex structures described herein can be combined with any one or more of the targets described herein. Any and all disclosure herein in relation to targets for antigen binding polypeptides of the invention is generally applicable, and applies equally and without reservation to each and every antigen binding polypeptide and antigen binding polypeptide complex described herein. For the avoidance of doubt, the VL1, VL2, VH1, and/or VH2 of each and every antigen binding polypeptide and antigen binding polypeptide complex described herein may independently bind to any one of said particularly preferred targets. Any and all disclosure herein in relation to targets for antigen binding polypeptides of the invention is generally applicable, and applies equally and without reservation to each and every antigen binding polypeptide and antigen binding polypeptide complex described herein. For the avoidance of doubt, the VL1, VL2, VH1, and/or VH2 of each and every antigen binding polypeptide and antigen binding polypeptide complex described herein may independently bind to any one of said particularly preferred targets.

[0161] In some aspects, the antigen binding polypeptide has a structure represented by VL1-VL2-VH2-VH1-CH1-CL-Fc; VH1-VH2-VL2-VL1-CH1-CL-Fc; VL1-VL2-VH2-VH1-CL-CH1-Fc; VH1-VH2-VL2-VL1-CL-CH1-Fc; VL1-L1-VL2-L2-VH2-L3-VH1-L4-CH1-L5-CL-Fc; VH1-L1-VH2-L2-VL2-L3-VL1-L4-CH1-L5-CL-Fc; VL1-L1-VL2-L2-VH2-L3-VH1-L4-CL-L5-CH1-Fc; or VH1-L1-VH2-L2-VL2-L3-VL1-L4-CL-L5-CH1-Fc; wherein VL1 is a first immunoglobulin light chain variable region that specifically binds to A2AR, APRIL, ATPDase, BAFF, BAFFR, BCMA, BlyS, BTK, BTLA, B7DC, B7H1, B7H2, B7H3, B7H4, B7H5, B7H6, B7H7, B7RP1, B7-4, C3, C5, CCL2, CCL3, CCL4, CCL5, CCL7, CCL8, CCL11, CCL15, CCL17, CCL19, CCL20, CCL21, CCL25 CCR3, CCR4, CD3, CD16A, CD19, CD20, CD24, CD27, CD28, CD30, CD38, CD39, CD40, CD40L, CD47, CD52, CD70, CD80, CD86, CD123, CD133, CD137, CD137L, CD160, CD272, CEACAM5, CLEC9, CLEC91, CRTH2, CSF-1, CSF-2, CSF-3, CXCL1, CXCL2, CXCL4, CXCL12, CXCL13, CXCR3, cMet, CTLA4, DLL3, DLL4, DNGR-1, E-cadherin, EGFR, ENTPD1, EpCAM, FCER1, FCER1A, FCER2, FGFR, FLAP, FOLH1, Gi24, GITR, GITRL, GPR5, GP100, GPRC5D, HER2, HER3, ICOSL, ICOS, HHLA2, HMGB1, HVEM, IDO, IFNa, IgE, IGF1R, IL2Rbeta, IL1, ILIA, IL1B, IL1F10, IL2, IL4, IL4Ra, IL5, IL5R, IL6, IL7, IL7Ra, IL8, IL9, IL9R, IL10, rhIL1O, IL12, IL13, IL13Ra1, IL13Ra2, IL15, IL17, IL17Rb, IL18, IL22, IL23, IL25, IL7, IL33, IL35, ITGB4, ITK, KIR, LAG3, LAMP1, leptin, LPFS2, MHC class II, MUC-1, MUC-16, NCR3LG1, NKG2D, NKp46, NTPDase-1, OX40, OX40L, PD-1, PD-L1, PD-L2, PROM1, S152, SIRPalpha, SISP1, SLC, SPG64, ST2, STEAP1, STEAP2, Syk kinase, STEAP1, TROP2, TACI, TDO, TGFBETA, T14, TIGIT, TIM3, TLR, TLR2, TLR4, TLR5, TLR9, TMEF1, TNFa, TNFRSF7, Tp55, TREM1, TSLP, TSLPR, TWEAK, VEGF, VISTA, Vstm3, or WUCAM; VL2 is a second immunoglobulin light chain variable region that specifically binds to A2AR, APRIL, ATPDase, BAFF, BAFFR, BCMA, BlyS, BTK, BTLA, B7DC, B7H1, B7H2, B7H3, B7H4, B7H5, B7H6, B7H7, B7RP1, B7-4, C3, C5, CCL2, CCL3, CCL4, CCL5, CCL7, CCL8, CCL11, CCL15, CCL17, CCL19, CCL20, CCL21, CCL25 CCR3, CCR4, CD3, CD16A, CD19, CD20, CD24, CD27, CD28, CD30, CD38, CD39, CD40, CD40L, CD47, CD52, CD70, CD80, CD86, CD123, CD133, CD137, CD137L, CD160, CD272, CEACAM5, CLEC9, CLEC91, CRTH2, CSF-1, CSF-2, CSF-3, CXCL1, CXCL2, CXCL4, CXCL12, CXCL13, CXCR3, cMet, CTLA4, DLL3, DLL4, DNGR-1, E-cadherin, EGFR, ENTPD1, EpCAM, FCER1, FCER1A, FCER2, FGFR, FLAP, FOLH1, Gi24, GITR, GITRL, GPR5, GP100, GPRC5D, HER2, HER3, ICOSL, ICOS, HHLA2, HMGB1, HVEM, IDO, IFNa, IgE, IGF1R, IL2Rbeta, IL1, ILIA, IL1B, IL1F10, IL2, IL4, IL4Ra, IL5, IL5R, 116, IL7, IL7Ra, IL8, IL9, IL9R, IL10, rhIL1O, IL12, IL13, IL13Ra1, IL13Ra2, IL15, IL17, IL17Rb, IL18, IL22, IL23, IL25, IL7, IL33, IL35, ITGB4, ITK, KIR, LAG3, LAMP1, leptin, LPFS2, MHC class II, MUC-1, MUC-16, NCR3LG1, NKG2D, NKp46, NTPDase-1, OX40, OX40L, PD-1, PD-L1, PD-L2, PROM1, S152, SIRPalpha, SISP1, SLC, SPG64, ST2, STEAP1, STEAP2, Syk kinase, STEAP1, TROP2, TACI, TDO, TGFBETA, T14, TIGIT, TIM3, TLR, TLR2, TLR4, TLR5, TLR9, TMEF1, TNFa, TNFRSF7, Tp55, TREM1, TSLP, TSLPR, TWEAK, VEGF, VISTA, Vstm3, or WUCAM; VH1 is a first immunoglobulin heavy chain variable region that specifically binds to A2AR, APRIL, ATPDase, BAFF, BAFFR, BCMA, BlyS, BTK, BTLA, B7DC, B7H1, B7H2, B7H3, B7H4, B7H5, B7H6, B7H7, B7RP1, B7-4, C3, C5, CCL2, CCL3, CCL4, CCL5, CCL7, CCL8, CCL11, CCL15, CCL17, CCL19, CCL20, CCL21, CCL25 CCR3, CCR4, CD3, CD16A, CD19, CD20, CD24, CD27, CD28, CD30, CD38, CD39, CD40, CD40L, CD47, CD52, CD70, CD80, CD86, CD123, CD133, CD137, CD137L, CD160, CD272, CEACAM5, CLEC9, CLEC91, CRTH2, CSF-1, CSF-2, CSF-3, CXCL1, CXCL2, CXCL4, CXCL12, CXCL13, CXCR3, cMet, CTLA4, DLL3, DLL4, DNGR-1, E-cadherin, EGFR, ENTPD1, EpCAM, FCER1, FCER1A, FCER2, FGFR, FLAP, FOLH1, Gi24, GITR, GITRL, GPR5, GP100, GPRC5D, HER2, HER3, ICOSL, ICOS, HHLA2, HMGB1, HVEM, IDO, IFNa, IgE, IGF1R, IL2Rbeta, IL1, ILIA, IL1B, IL1F10, IL2, IL4, IL4Ra, IL5, IL5R, IL6, IL7, IL7Ra, IL8, IL9, IL9R, IL10, rhIL1O, IL12, IL13, IL13Ra1, IL13Ra2, IL15, IL17, IL17Rb, IL18, IL22, IL23, IL25, IL7, IL33, IL35, ITGB4, ITK, KIR, LAG3, LAMP1, leptin, LPFS2, MHC class II, MUC-1, MUC-16, NCR3LG1, NKG2D, NKp46, NTPDase-1, OX40, OX40L, PD-1, PD-L1, PD-L2, PROM1, S152, SIRPalpha, SISP1, SLC, SPG64, ST2, STEAP1, STEAP2, Syk kinase, STEAP1, TROP2, TACI, TDO, TGFBETA, T14, TIGIT, TIM3, TLR, TLR2, TLR4, TLR5, TLR9, TMEF1, TNFa, TNFRSF7, Tp55, TREM1, TSLP, TSLPR, TWEAK, VEGF, VISTA, Vstm3, or WUCAM; VH2 is a second immunoglobulin heavy chain variable region that specifically binds to A2AR, APRIL, ATPDase, BAFF, BAFFR, BCMA, BlyS, BTK, BTLA, B7DC, B7H1, B7H2, B7H3, B7H4, B7H5, B7H6, B7H7, B7RP1, B7-4, C3, C5, CCL2, CCL3, CCL4, CCL5, CCL7, CCL8, CCL11, CCL15, CCL17, CCL19, CCL20, CCL21, CCL25 CCR3, CCR4, CD3, CD16A, CD19, CD20, CD24, CD27, CD28, CD30, CD38, CD39, CD40, CD40L, CD47, CD52, CD70, CD80, CD86, CD123, CD133, CD137, CD137L, CD160, CD272, CEACAM5, CLEC9, CLEC91, CRTH2, CSF-1, CSF-2, CSF-3, CXCL1, CXCL2, CXCL4, CXCL12, CXCL13, CXCR3, cMet, CTLA4, DLL3, DLL4, DNGR-1, E-cadherin, EGFR, ENTPD1, EpCAM, FCER1, FCER1A, FCER2, FGFR, FLAP, FOLH1, Gi24, GITR, GITRL, GPR5, GP100, GPRC5D, HER2, HER3, ICOSL, ICOS, HHLA2, HMGB1, HVEM, IDO, IFNa, IgE, IGF1R, IL2Rbeta, IL1, ILIA, IL1B, IL1F10, IL2, IL4, IL4Ra, IL5, IL5R, IL6, IL7, IL7Ra, IL8, IL9, IL9R, IL10, rhIL1O, IL12, IL13, IL13Ra1, IL13Ra2, IL15, IL17, IL17Rb, IL18, IL22, IL23, IL25, IL7, IL33, IL35, ITGB4, ITK, KIR, LAG3, LAMP1, leptin, LPFS2, MHC class II, MUC-1, MUC-16, NCR3LG1, NKG2D, NKp46, NTPDase-1, OX40, OX40L, PD-1, PD-L1, PD-L2, PROM1, S152, SIRPalpha, SISP1, SLC, SPG64, ST2, STEAP1, STEAP2, Syk kinase, STEAP1, TROP2, TACI, TDO, TGFBETA, T14, TIGIT, TIM3, TLR, TLR2, TLR4, TLR5, TLR9, TMEF1, TNFa, TNFRSF7, Tp55, TREM1, TSLP, TSLPR, TWEAK, VEGF, VISTA, Vstm3, or WUCAM; Fc is a region comprising an immunoglobulin heavy chain constant region 2 (CH2), an immunoglobulin heavy chain constant region 3 (CH3), and optionally, an immunoglobulin hinge; CH1 is an immunoglobulin heavy chain constant region 1; CL is an immunoglobulin light chain constant region; and L1, L2, L3, L4 and L5 are amino acid linkers. In some aspects, the antigen binding polypeptide has a structure represented by VL1-VL2-VH2-VH1-CH1-CL-Fc; wherein VL1, VL2, VH1 and/or VH2 specifically binds to A2AR, APRIL, ATPDase, BAFF, BAFFR, BCMA, BlyS, BTK, BTLA, B7DC, B7H1, B7H2, B7H3, B7H4, B7H5, B7H6, B7H7, B7RP1, B7-4, C3, C5, CCL2, CCL3, CCL4, CCL5, CCL7, CCL8, CCL11, CCL15, CCL17, CCL19, CCL20, CCL21, CCL25 CCR3, CCR4, CD3, CD16A, CD19, CD20, CD24, CD27, CD28, CD30, CD38, CD39, CD40, CD40L, CD47, CD52, CD70, CD80, CD86, CD123, CD133, CD137, CD137L, CD160, CD272, CEACAM5, CLEC9, CLEC91, CRTH2, CSF-1, CSF-2, CSF-3, CXCL1, CXCL2, CXCL4, CXCL12, CXCL13, CXCR3, cMet, CTLA4, DLL3, DLL4, DNGR-1, E-cadherin, EGFR, ENTPD1, EpCAM, FCER1, FCER1A, FCER2, FGFR, FLAP, FOLH1, Gi24, GITR, GITRL, GPR5, GP100, GPRC5D, HER2, HER3, ICOSL, ICOS, HHLA2, HMGB1, HVEM, IDO, IFNa, IgE, IGF1R, IL2Rbeta, IL1, ILIA, IL1B, IL1F10, IL2, IL4, IL4Ra, IL5, IL5R, IL6, IL7, IL7Ra, IL8, IL9, IL9R, IL10, rhIL1O, IL12, IL13, IL13Ra1, IL13Ra2, IL15, IL17, IL17Rb, IL18, IL22, IL23, IL25, IL7, IL33, IL35, ITGB4, ITK, KIR, LAG3, LAMP1, leptin, LPFS2, MHC class II, MUC-1, MUC-16, NCR3LG1, NKG2D, NKp46, NTPDase-1, OX40, OX40L, PD-1, PD-L1, PD-L2, PROM1, S152, SIRPalpha, SISP1, SLC, SPG64, ST2, STEAP1, STEAP2, Syk kinase, STEAP1, TROP2, TACI, TDO, TGFBETA, T14, TIGIT, TIM3, TLR, TLR2, TLR4, TLR5, TLR9, TMEF1, TNFa, TNFRSF7, Tp55, TREM1, TSLP, TSLPR, TWEAK, VEGF, VISTA, Vstm3, or WUCAM. In some aspects, the antigen binding polypeptide has a structure represented by VH1-VH2-VL2-VL1-CH1-CL-Fc; wherein VL1, VL2, VH1 and/or VH2 specifically binds to A2AR, APRIL, ATPDase, BAFF, BAFFR, BCMA, BlyS, BTK, BTLA, B7DC, B7H1, B7H2, B7H3, B7H4, B7H5, B7H6, B7H7, B7RP1, B7-4, C3, C5, CCL2, CCL3, CCL4, CCL5, CCL7, CCL8, CCL11, CCL15, CCL17, CCL19, CCL20, CCL21, CCL25 CCR3, CCR4, CD3, CD16A, CD19, CD20, CD24, CD27, CD28, CD30, CD38, CD39, CD40, CD40L, CD47, CD52, CD70, CD80, CD86, CD123, CD133, CD137, CD137L, CD160, CD272, CEACAM5, CLEC9, CLEC91, CRTH2, CSF-1, CSF-2, CSF-3, CXCL1, CXCL2, CXCL4, CXCL12, CXCL13, CXCR3, cMet, CTLA4, DLL3, DLL4, DNGR-1, E-cadherin, EGFR, ENTPD1, EpCAM, FCER1, FCER1A, FCER2, FGFR, FLAP, FOLH1, Gi24, GITR, GITRL, GPR5, GP100, GPRC5D, HER2, HER3, ICOSL, ICOS, HHLA2, HMGB1, HVEM, IDO, IFNa, IgE, IGF1R, IL2Rbeta, IL1, ILIA, IL1B, IL1F10, IL2, IL4, IL4Ra, IL5, IL5R, IL6, IL7, IL7Ra, IL8, IL9, IL9R, IL10, rhIL1O, IL12, IL13, IL13Ra1, IL13Ra2, IL15, IL17, IL17Rb, IL18, IL22, IL23, IL25, IL7, IL33, IL35, ITGB4, ITK, KIR, LAG3, LAMP1, leptin, LPFS2, MHC class II, MUC-1, MUC-16, NCR3LG1, NKG2D, NKp46, NTPDase-1, OX40, OX40L, PD-1, PD-L1, PD-L2, PROM1, S152, SIRPalpha, SISP1, SLC, SPG64, ST2, STEAP1, STEAP2, Syk kinase, STEAP1, TROP2, TACI, TDO, TGFBETA, T14, TIGIT, TIM3, TLR, TLR2, TLR4, TLR5, TLR9, TMEF1, TNFa, TNFRSF7, Tp55, TREM1, TSLP, TSLPR, TWEAK, VEGF, VISTA, Vstm3, or WUCAM. In some aspects, the antigen binding polypeptide has a structure represented by VL1-VL2-VH2-VH1-CL-CH1-Fc; wherein VL1, VL2, VH1 and/or VH2 specifically binds to A2AR, APRIL, ATPDase, BAFF, BAFFR, BCMA, BlyS, BTK, BTLA, B7DC, B7H1, B7H2, B7H3, B7H4, B7H5, B7H6, B7H7, B7RP1, B7-4, C3, C5, CCL2, CCL3, CCL4, CCL5, CCL7, CCL8, CCL11, CCL15, CCL17, CCL19, CCL20, CCL21, CCL25 CCR3, CCR4, CD3, CD16A, CD19, CD20, CD24, CD27, CD28, CD30, CD38, CD39, CD40, CD40L, CD47, CD52, CD70, CD80, CD86, CD123, CD133, CD137, CD137L, CD160, CD272, CEACAM5, CLEC9, CLEC91, CRTH2, CSF-1, CSF-2, CSF-3, CXCL1, CXCL2, CXCL4, CXCL12, CXCL13, CXCR3, cMet, CTLA4, DLL3, DLL4, DNGR-1, E-cadherin, EGFR, ENTPD1, EpCAM, FCER1, FCER1A, FCER2, FGFR, FLAP, FOLH1, Gi24, GITR, GITRL, GPR5, GP100, GPRC5D, HER2, HER3, ICOSL, ICOS, HHLA2, HMGB1, HVEM, IDO, IFNa, IgE, IGF1R, IL2Rbeta, IL1, ILIA, IL1B, IL1F10, IL2, IL4, IL4Ra, IL5, IL5R, IL6, IL7, IL7Ra, IL8, IL9, IL9R, IL10, rhIL1O, IL12, IL13, IL13Ra1, IL13Ra2, IL15, IL17, IL17Rb, IL18, IL22, IL23, IL25, IL7, IL33, IL35, ITGB4, ITK, KIR, LAG3, LAMP1, leptin, LPFS2, MHC class II, MUC-1, MUC-16, NCR3LG1, NKG2D, NKp46, NTPDase-1, OX40, OX40L, PD-1, PD-L1, PD-L2, PROM1, S152, SIRPalpha, SISP1, SLC, SPG64, ST2, STEAP1, STEAP2, Syk kinase, STEAP1, TROP2, TACI, TDO, TGFBETA, T14, TIGIT, TIM3, TLR, TLR2, TLR4, TLR5, TLR9, TMEF1, TNFa, TNFRSF7, Tp55, TREM1, TSLP, TSLPR, TWEAK, VEGF, VISTA, Vstm3, or WUCAM. In some aspects, the antigen binding polypeptide has a structure represented by VH1-VH2-VL2-VL1-CL-CH1-Fc; wherein VL1, VL2, VH1 and/or VH2 specifically binds to A2AR, APRIL, ATPDase, BAFF, BAFFR, BCMA, BlyS, BTK, BTLA, B7DC, B7H1, B7H2, B7H3, B7H4, B7H5, B7H6, B7H7, B7RP1, B7-4, C3, C5, CCL2, CCL3, CCL4, CCL5, CCL7, CCL8, CCL11, CCL15, CCL17, CCL19, CCL20, CCL21, CCL25 CCR3, CCR4, CD3, CD16A, CD19, CD20, CD24, CD27, CD28, CD30, CD38, CD39, CD40, CD40L, CD47, CD52, CD70, CD80, CD86, CD123, CD133, CD137, CD137L, CD160, CD272, CEACAM5, CLEC9, CLEC91, CRTH2, CSF-1, CSF-2, CSF-3, CXCL1, CXCL2, CXCL4, CXCL12, CXCL13, CXCR3, cMet, CTLA4, DLL3, DLL4, DNGR-1, E-cadherin, EGFR, ENTPD1, EpCAM, FCER1, FCER1A, FCER2, FGFR, FLAP, FOLH1, Gi24, GITR, GITRL, GPR5, GP100, GPRC5D, HER2, HER3, ICOSL, ICOS, HHLA2, HMGB1, HVEM, IDO, IFNa, IgE, IGF1R, IL2Rbeta, IL1, ILIA, IL1B, IL1F10, IL2, IL4, IL4Ra, IL5, IL5R, IL6, IL7, IL7Ra, IL8, IL9, IL9R, IL10, rhIL1O, IL12, IL13, IL13Ra1, IL13Ra2, IL15, IL17, IL17Rb, IL18, IL22, IL23, IL25, IL7, IL33, IL35, ITGB4, ITK, KIR, LAG3, LAMP1, leptin, LPFS2, MHC class II, MUC-1, MUC-16, NCR3LG1, NKG2D, NKp46, NTPDase-1, OX40, OX40L, PD-1, PD-L1, PD-L2, PROM1, S152, SIRPalpha, SISP1, SLC, SPG64, ST2, STEAP1, STEAP2, Syk kinase, STEAP1, TROP2, TACI, TDO, TGFBETA, T14, TIGIT, TIM3, TLR, TLR2, TLR4, TLR5, TLR9, TMEF1, TNFa, TNFRSF7, Tp55, TREM1, TSLP, TSLPR, TWEAK, VEGF, VISTA, Vstm3, or WUCAM. In some aspects, the antigen binding polypeptide has a structure represented by VL1-L1-VL2-L2-VH2-L3-VH1-L4-CH1-L5-CL-Fc; wherein VL1, VL2, VH1 and/or VH2 specifically binds to A2AR, APRIL, ATPDase, BAFF, BAFFR, BCMA, BlyS, BTK, BTLA, B7DC, B7H1, B7H2, B7H3, B7H4, B7H5, B7H6, B7H7, B7RP1, B7-4, C3, C5, CCL2, CCL3, CCL4, CCL5, CCL7, CCL8, CCL11, CCL15, CCL17, CCL19, CCL20, CCL21, CCL25 CCR3, CCR4, CD3, CD16A, CD19, CD20, CD24, CD27, CD28, CD30, CD38, CD39, CD40, CD40L, CD47, CD52, CD70, CD80, CD86, CD123, CD133, CD137, CD137L, CD160, CD272, CEACAM5, CLEC9, CLEC91, CRTH2, CSF-1, CSF-2, CSF-3, CXCL1, CXCL2, CXCL4, CXCL12, CXCL13, CXCR3, cMet, CTLA4, DLL3, DLL4, DNGR-1, E-cadherin, EGFR, ENTPD1, EpCAM, FCER1, FCER1A, FCER2, FGFR, FLAP, FOLH1, Gi24, GITR, GITRL, GPR5, GP100, GPRC5D, HER2, HER3, ICOSL, ICOS, HHLA2, HMGB1, HVEM, IDO, IFNa, IgE, IGF1R, IL2Rbeta, IL1, ILIA, IL1B, IL1F10, IL2, IL4, IL4Ra, IL5, IL5R, IL6, IL7, IL7Ra, IL8, IL9, IL9R, IL10, rhIL1O, IL12, IL13, IL13Ra1, IL13Ra2, IL15, IL17, IL17Rb, IL18, IL22, IL23, IL25, IL7, IL33, IL35, ITGB4, ITK, KIR, LAG3, LAMP1, leptin, LPFS2, MHC class II, MUC-1, MUC-16, NCR3LG1, NKG2D, NKp46, NTPDase-1, OX40, OX40L, PD-1, PD-L1, PD-L2, PROM1, S152, SIRPalpha, SISP1, SLC, SPG64, ST2, STEAP1, STEAP2, Syk kinase, STEAP1, TROP2, TACI, TDO, TGFBETA, T14, TIGIT, TIM3, TLR, TLR2, TLR4, TLR5, TLR9, TMEF1, TNFa, TNFRSF7, Tp55, TREM1, TSLP, TSLPR, TWEAK, VEGF, VISTA, Vstm3, or WUCAM. In some aspects, the antigen binding polypeptide has a structure represented by VH1-L1-VH2-L2-VL2-L3-VL1-L4-CH1-L5-CL-Fc; wherein VL1, VL2, VH1 and/or VH2 specifically binds to A2AR, APRIL, ATPDase, BAFF, BAFFR, BCMA, BlyS, BTK, BTLA, B7DC, B7H1, B7H2, B7H3, B7H4, B7H5, B7H6, B7H7, B7RP1, B7-4, C3, C5, CCL2, CCL3, CCL4, CCL5, CCL7, CCL8, CCL11, CCL15, CCL17, CCL19, CCL20, CCL21, CCL25 CCR3, CCR4, CD3, CD16A, CD19, CD20, CD24, CD27, CD28, CD30, CD38, CD39, CD40, CD40L, CD47, CD52, CD70, CD80, CD86, CD123, CD133, CD137, CD137L, CD160, CD272, CEACAM5, CLEC9, CLEC91, CRTH2, CSF-1, CSF-2, CSF-3, CXCL1, CXCL2, CXCL4, CXCL12, CXCL13, CXCR3, cMet, CTLA4, DLL3, DLL4, DNGR-1, E-cadherin, EGFR, ENTPD1, EpCAM, FCER1, FCER1A, FCER2, FGFR, FLAP, FOLH1, Gi24, GITR, GITRL, GPR5, GP100, GPRC5D, HER2, HER3, ICOSL, ICOS, HHLA2, HMGB1, HVEM, IDO, IFNa, IgE, IGF1R, IL2Rbeta, IL1, ILIA, IL1B, IL1F10, IL2, IL4, IL4Ra, IL5, IL5R, IL6, IL7, IL7Ra, IL8, IL9, IL9R, IL10, rhIL1O, IL12, IL13, IL13Ra1, IL13Ra2, IL15, IL17, IL17Rb, IL18, IL22, IL23, IL25, IL7, IL33, IL35, ITGB4, ITK, KIR, LAG3, LAMP1, leptin, LPFS2, MHC class II, MUC-1, MUC-16, NCR3LG1, NKG2D, NKp46, NTPDase-1, OX40, OX40L, PD-1, PD-L1, PD-L2, PROM1, S152, SIRPalpha, SISP1, SLC, SPG64, ST2, STEAP1, STEAP2, Syk kinase, STEAP1, TROP2, TACI, TDO, TGFBETA, T14, TIGIT, TIM3, TLR, TLR2, TLR4, TLR5, TLR9, TMEF1, TNFa, TNFRSF7, Tp55, TREM1, TSLP, TSLPR, TWEAK, VEGF, VISTA, Vstm3, or WUCAM. In some aspects, the antigen binding polypeptide has a structure represented by VL1-L1-VL2-L2-VH2-L3-VH1-L4-CL-L5-CH1-Fc; wherein VL1, VL2, VH1 and/or VH2 specifically binds to A2AR, APRIL, ATPDase, BAFF, BAFFR, BCMA, BlyS, BTK, BTLA, B7DC, B7H1, B7H2, B7H3, B7H4, B7H5, B7H6, B7H7, B7RP1, B7-4, C3, C5, CCL2, CCL3, CCL4, CCL5, CCL7, CCL8, CCL11, CCL15, CCL17, CCL19, CCL20, CCL21, CCL25 CCR3, CCR4, CD3, CD16A, CD19, CD20, CD24, CD27, CD28, CD30, CD38, CD39, CD40, CD40L, CD47, CD52, CD70, CD80, CD86, CD123, CD133, CD137, CD137L, CD160, CD272, CEACAM5, CLEC9, CLEC91, CRTH2, CSF-1, CSF-2, CSF-3, CXCL1, CXCL2, CXCL4, CXCL12, CXCL13, CXCR3, cMet, CTLA4, DLL3, DLL4, DNGR-1, E-cadherin, EGFR, ENTPD1, EpCAM, FCER1, FCER1A, FCER2, FGFR, FLAP, FOLH1, Gi24, GITR, GITRL, GPR5, GP100, GPRC5D, HER2, HER3, ICOSL, ICOS, HHLA2, HMGB1, HVEM, IDO, IFNa, IgE, IGF1R, IL2Rbeta, IL1, ILIA, IL1B, IL1F10, IL2, IL4, IL4Ra, IL5, IL5R, IL6, IL7, IL7Ra, IL8, IL9, IL9R, IL10, rhIL1O, IL12, IL13, IL13Ra1, IL13Ra2, IL15, IL17, IL17Rb, IL18, IL22, IL23, IL25, IL7, IL33, IL35, ITGB4, ITK, KIR, LAG3, LAMP1, leptin, LPFS2, MHC class II, MUC-1, MUC-16, NCR3LG1, NKG2D, NKp46, NTPDase-1, OX40, OX40L, PD-1, PD-L1, PD-L2, PROM1, S152, SIRPalpha, SISP1, SLC, SPG64, ST2, STEAP1, STEAP2, Syk kinase, STEAP1, TROP2, TACI, TDO, TGFBETA, T14, TIGIT, TIM3, TLR, TLR2, TLR4, TLR5, TLR9, TMEF1, TNFa, TNFRSF7, Tp55, TREM1, TSLP, TSLPR, TWEAK, VEGF, VISTA, Vstm3, or WUCAM. In some aspects, the antigen binding polypeptide has a structure represented by VH1-L1-VH2-L2-VL2-L3-VL1-L4-CL-L5-CH1-Fc; wherein VL1, VL2, VH1 and/or VH2 specifically binds to A2AR, APRIL, ATPDase, BAFF, BAFFR, BCMA, BlyS, BTK, BTLA, B7DC, B7H1, B7H2, B7H3, B7H4, B7H5, B7H6, B7H7, B7RP1, B7-4, C3, C5, CCL2, CCL3, CCL4, CCL5, CCL7, CCL8, CCL11, CCL15, CCL17, CCL19, CCL20, CCL21, CCL25 CCR3, CCR4, CD3, CD16A, CD19, CD20, CD24, CD27, CD28, CD30, CD38, CD39, CD40, CD40L, CD47, CD52, CD70, CD80, CD86, CD123, CD133, CD137, CD137L, CD160, CD272, CEACAM5, CLEC9, CLEC91, CRTH2, CSF-1, CSF-2, CSF-3, CXCL1, CXCL2, CXCL4, CXCL12, CXCL13, CXCR3, cMet, CTLA4, DLL3, DLL4, DNGR-1, E-cadherin, EGFR, ENTPD1, EpCAM, FCER1, FCER1A, FCER2, FGFR, FLAP, FOLH1, Gi24, GITR, GITRL, GPR5, GP100, GPRC5D, HER2, HER3, ICOSL, ICOS, HHLA2, HMGB1, HVEM, IDO, IFNa, IgE, IGF1R, IL2Rbeta, IL1, ILIA, IL1B, IL1F10, IL2, IL4, IL4Ra, IL5, IL5R, IL6, IL7, IL7Ra, IL8, IL9, IL9R, IL10, rhIL1O, IL12, IL13, IL13Ra1, IL13Ra2, IL15, IL17, IL17Rb, IL18, IL22, IL23, IL25, IL7, IL33, IL35, ITGB4, ITK, KIR, LAG3, LAMP1, leptin, LPFS2, MHC class II, MUC-1, MUC-16, NCR3LG1, NKG2D, NKp46, NTPDase-1, OX40, OX40L, PD-1, PD-L1, PD-L2, PROM1, S152, SIRPalpha, SISP1, SLC, SPG64, ST2, STEAP1, STEAP2, Syk kinase, STEAP1, TROP2, TACI, TDO, TGFBETA, T14, TIGIT, TIM3, TLR, TLR2, TLR4, TLR5, TLR9, TMEF1, TNFa, TNFRSF7, Tp55, TREM1, TSLP, TSLPR, TWEAK, VEGF, VISTA, Vstm3, or WUCAM. Any and all disclosure herein in relation to targets for antigen binding polypeptides of the invention is generally applicable, and applies equally and without reservation to each and every antigen binding polypeptide and antigen binding polypeptide complex described herein. For the avoidance of doubt, the VL1, VL2, VH1, and/or VH2 of each and every antigen binding polypeptide and antigen binding polypeptide complex described herein may independently bind to any one of said particularly preferred targets.

[0162] In some aspects, the antigen binding polypeptide complex comprising a first polypeptide and a second polypeptide; wherein the first polypeptide has a structure represented by VL1-VL2-VH2-VH1-CH1-Fc; VH1-VH2-VL2-VL1-CH1-Fc; VL1-VL2-VH2-VH1-CL-Fc; VH1-VH2-VL2-VL1-CL-Fc; VL1-VL2-VH2-VH1-CH1-CL-Fc; VH1-VH2-VL2-VL1-CH1-CL-Fc; VL1-VL2-VH2-VH1-CL-CH1-Fc; VH1-VH2-VL2-VL1-CL-CH1-Fc; VL1-L1-VL2-L2-VH2-L3-VH1-L4-CH1-Fc; VH1-L1-VH2-L2-VL2-L3-VL1-L4-CH1-Fc; VL1-L1-VL2-L2-VH2-L3-VH1-L4-CL-Fc; VH1-L1-VH2-L2-VL2-L3-VL1-L4-CL-Fc; VL1-L1-VL2-L2-VH2-L3-VH1-L4-CH1-L5-CL-Fe; VH1-L1-VH2-L2-VL2-L3-VL1-L4-CH1-L5-CL-Fe; VL1-L1-VL2-L2-VH2-L3-VH1-L4-CL-L5-CH1-Fc; or VH1-L1-VH2-L2-VL2-L3-VL1-L4-CL-L5-CH1-Fc; wherein the second polypeptide has a structure represented by Fc; VL1-VL2-VH2-VH1-CH1-Fc; VH1-VH2-VL2-VL1-CH1-Fc; VL1-VL2-VH2-VH1-CL-Fc; VH1-VH2-VL2-VL1-CL-Fc; VL1-VL2-VH2-VH1-CH1-CL-Fc; VH1-VH2-VL2-VL1-CH1-CL-Fc; VL1-VL2-VH2-VH1-CL-CH1-Fc; VH1-VH2-VL2-VL1-CL-CH1-Fc; VL1-L1-VL2-L2-VH2-L3-VH1-L4-CH1-Fc; VH1-L1-VH2-L2-VL2-L3-VL1-L4-CH1-Fe; VL1-L1-VL2-L2-VH2- L3-VH1-L4-CL-Fc; VH1-L1-VH2-L2-VL2-L3-VL1-L4-CL-Fc; VL1-L1-VL2-L2-VH2-L3-VH1-L4-CH1-L5-CL-Fe; VH1-L1-VH2-L2-VL2-L3-VL1-L4-CH1-L5-CL-Fe; VL1-L1-VL2-L2-VH2-L3-VH1-L4-CL-L5-CH1-Fe; or VH1-L1-VH2-L2-VL2-L3-VL1-L4-CL-L5-CH1-Fe; wherein VL1 is a first immunoglobulin light chain variable region that specifically binds to A2AR, APRIL, ATPDase, BAFF, BAFFR, BCMA, BlyS, BTK, BTLA, B7DC, B7H1, B7H2, B7H3, B7H4, B7H5, B7H6, B7H7, B7RP1, B7-4, C3, C5, CCL2, CCL3, CCL4, CCL5, CCL7, CCL8, CCL11, CCL15, CCL17, CCL19, CCL20, CCL21, CCL25 CCR3, CCR4, CD3, CD16A, CD19, CD20, CD24, CD27, CD28, CD30, CD38, CD39, CD40, CD40L, CD47, CD52, CD70, CD80, CD86, CD123, CD133, CD137, CD137L, CD160, CD272, CEACAM5, CLEC9, CLEC91, CRTH2, CSF-1, CSF-2, CSF-3, CXCL1, CXCL2, CXCL4, CXCL12, CXCL13, CXCR3, cMet, CTLA4, DLL3, DLL4, DNGR-1, E-cadherin, EGFR, ENTPD1, EpCAM, FCER1, FCER1A, FCER2, FGFR, FLAP, FOLH1, Gi24, GITR, GITRL, GPR5, GP100, GPRC5D, HER2, HER3, ICOSL, ICOS, HHLA2, HMGB1, HVEM, IDO, IFNa, IgE, IGF1R, IL2Rbeta, IL1, ILIA, IL1B, IL1F10, IL2, IL4, IL4Ra, IL5, IL5R, IL6, IL7, IL7Ra, IL8, IL9, IL9R, IL10, rhIL1O, IL12, IL13, IL13Ra1, IL13Ra2, IL15, IL17, IL17Rb, IL18, IL22, IL23, IL25, IL7, IL33, IL35, ITGB4, ITK, KIR, LAG3, LAMP1, leptin, LPFS2, MHC class II, MUC-1, MUC-16, NCR3LG1, NKG2D, NKp46, NTPDase-1, OX40, OX40L, PD-1, PD-L1, PD-L2, PROM1, S152, SIRPalpha, SISP1, SLC, SPG64, ST2, STEAP2, Syk kinase, STEAP1, TROP2, TACI, TDO, TGFBETA, T14, TIGIT, TIM3, TLR, TLR2, TLR4, TLR5, TLR9, TMEF1, TNFa, TNFRSF7, Tp55, TREM1, TSLP, TSLPR, TWEAK, VEGF, VISTA, Vstm3, or WUCAM; VL2 is a second immunoglobulin light chain variable region that specifically binds to A2AR, APRIL, ATPDase, BAFF, BAFFR, BCMA, BlyS, BTK, BTLA, B7DC, B7H1, B7H2, B7H3, B7H4, B7H5, B7H6, B7H7, B7RP1, B7-4, C3, C5, CCL2, CCL3, CCL4, CCL5, CCL7, CCL8, CCL11, CCL15, CCL17, CCL19, CCL20, CCL21, CCL25 CCR3, CCR4, CD3, CD16A, CD19, CD20, CD24, CD27, CD28, CD30, CD38, CD39, CD40, CD40L, CD47, CD52, CD70, CD80, CD86, CD123, CD133, CD137, CD137L, CD160, CD272, CEACAM5, CLEC9, CLEC91, CRTH2, CSF-1, CSF-2, CSF-3, CXCL1, CXCL2, CXCL4, CXCL12, CXCL13, CXCR3, cMet, CTLA4, DLL3, DLL4, DNGR-1, E-cadherin, EGFR, ENTPD1, EpCAM, FCER1, FCER1A, FCER2, FGFR, FLAP, FOLH1, Gi24, GITR, GITRL, GPR5, GP100, GPRC5D, HER2, HER3, ICOSL, ICOS, HHLA2, HMGB1, HVEM, IDO, IFNa, IgE, IGF1R, IL2Rbeta, IL1, ILIA, IL1B, IL1F10, IL2, IL4, IL4Ra, IL5, IL5R, IL6, IL7, IL7Ra, IL8, IL9, IL9R, IL10, rhIL1O, IL12, IL13, IL13Ra1, IL13Ra2, IL15, IL17, IL17Rb, IL18, IL22, IL23, IL25, IL7, IL33, IL35, ITGB4, ITK, KIR, LAG3, LAMP1, leptin, LPFS2, MHC class II, MUC-1, MUC-16, NCR3LG1, NKG2D, NKp46, NTPDase-1, OX40, OX40L, PD-1, PD-L1, PD-L2, PROM1, S152, SIRPalpha, SISP1, SLC, SPG64, ST2, STEAP1, STEAP2, Syk kinase, STEAP1, TROP2, TACI, TDO, TGFBETA, T14, TIGIT, TIM3, TLR, TLR2, TLR4, TLR5, TLR9, TMEF1, TNFa, TNFRSF7, Tp55, TREM1, TSLP, TSLPR, TWEAK, VEGF, VISTA, Vstm3, or WUCAM; VH1 is a first immunoglobulin heavy chain variable region that specifically binds to A2AR, APRIL, ATPDase, BAFF, BAFFR, BCMA, BlyS, BTK, BTLA, B7DC, B7H1, B7H2, B7H3, B7H4, B7H5, B7H6, B7H7, B7RP1, B7-4, C3, C5, CCL2, CCL3, CCL4, CCL5, CCL7, CCL8, CCL11, CCL15, CCL17, CCL19, CCL20, CCL21, CCL25 CCR3, CCR4, CD3, CD16A, CD19, CD20, CD24, CD27, CD28, CD30, CD38, CD39, CD40, CD40L, CD47, CD52, CD70, CD80, CD86, CD123, CD133, CD137, CD137L, CD160, CD272, CEACAM5, CLEC9, CLEC91, CRTH2, CSF-1, CSF-2, CSF-3, CXCL1, CXCL2, CXCL4, CXCL12, CXCL13, CXCR3, cMet, CTLA4, DLL3, DLL4, DNGR-1, E-cadherin, EGFR, ENTPD1, EpCAM, FCER1, FCER1A, FCER2, FGFR, FLAP, FOLH1, Gi24, GITR, GITRL, GPR5, GP100, GPRC5D, HER2, HER3, ICOSL, ICOS, HHLA2, HMGB1, HVEM, IDO, IFNa, IgE, IGF1R, IL2Rbeta, IL1, ILIA, IL1B, IL1F10, IL2, IL4, IL4Ra, IL5, IL5R, 116, IL7, IL7Ra, IL8, IL9, IL9R, IL10, rhIL1O, IL12, IL13, IL13Ra1, IL13Ra2, IL15, IL17, IL17Rb, IL18, IL22, IL23, IL25, IL7, IL33, IL35, ITGB4, ITK, KIR, LAG3, LAMP1, leptin, LPFS2, MHC class II, MUC-1, MUC-16, NCR3LG1, NKG2D, NKp46, NTPDase-1, OX40, OX40L, PD-1, PD-L1, PD-L2, PROM1, S152, SIRPalpha, SISP1, SLC, SPG64, ST2, STEAP1, STEAP2, Syk kinase, STEAP1, TROP2, TACI, TDO, TGFBETA, T14, TIGIT, TIM3, TLR, TLR2, TLR4, TLR5, TLR9, TMEF1, TNFa, TNFRSF7, Tp55, TREM1, TSLP, TSLPR, TWEAK, VEGF, VISTA, Vstm3, or WUCAM; VH2 is a second immunoglobulin heavy chain variable region that specifically binds to A2AR, APRIL, ATPDase, BAFF, BAFFR, BCMA, BlyS, BTK, BTLA, B7DC, B7H1, B7H2, B7H3, B7H4, B7H5, B7H6, B7H7, B7RP1, B7-4, C3, C5, CCL2, CCL3, CCL4, CCL5, CCL7, CCL8, CCL11, CCL15, CCL17, CCL19, CCL20, CCL21, CCL25 CCR3, CCR4, CD3, CD16A, CD19, CD20, CD24, CD27, CD28, CD30, CD38, CD39, CD40, CD40L, CD47, CD52, CD70, CD80, CD86, CD123, CD133, CD137, CD137L, CD160, CD272, CEACAM5, CLEC9, CLEC91, CRTH2, CSF-1, CSF-2, CSF-3, CXCL1, CXCL2, CXCL4, CXCL12, CXCL13, CXCR3, cMet, CTLA4, DLL3, DLL4, DNGR-1, E-cadherin, EGFR, ENTPD1, EpCAM, FCER1, FCER1A, FCER2, FGFR, FLAP, FOLH1, Gi24, GITR, GITRL, GPR5, GP100, GPRC5D, HER2, HER3, ICOSL, ICOS, HHLA2, HMGB1, HVEM, IDO, IFNa, IgE, IGF1R, IL2Rbeta, IL1, ILIA, IL1B, IL1F10, IL2, IL4, IL4Ra, IL5, IL5R, IL6, IL7, IL7Ra, IL8, IL9, IL9R, IL10, rhIL1O, IL12, IL13, IL13Ra1, IL13Ra2, IL15, IL17, IL17Rb, IL18, IL22, IL23, IL25, IL7, IL33, IL35, ITGB4, ITK, KIR, LAG3, LAMP1, leptin, LPFS2, MHC class II, MUC-1, MUC-16, NCR3LG1, NKG2D, NKp46, NTPDase-1, OX40, OX40L, PD-1, PD-L1, PD-L2, PROM1, S152, SIRPalpha, SISP1, SLC, SPG64, ST2, STEAP1, STEAP2, Syk kinase, STEAP1, TROP2, TACI, TDO, TGFBETA, T14, TIGIT, TIM3, TLR, TLR2, TLR4, TLR5, TLR9, TMEF1, TNFa, TNFRSF7, Tp55, TREM1, TSLP, TSLPR, TWEAK, VEGF, VISTA, Vstm3, or WUCAM; Fc is a region comprising an immunoglobulin heavy chain constant region 2 (CH2), an immunoglobulin heavy chain constant region 3 (CH3), and optionally, an immunoglobulin hinge; CH1 is an immunoglobulin heavy chain constant region 1; CL is an immunoglobulin light chain constant region; and L1, L2, L3, L4 and L5 are amino acid linkers. In some aspects, the first polypeptide has a structure represented by VL1-VL2-VH2-VH1-CH1-Fc and the second polypeptide has a structure represented by Fc; VL1-VL2-VH2-VH1-CH1-Fc; VH1-VH2-VL2-VL1-CH1-Fc; VL1-VL2-VH2-VH1-CL-Fc; VH1-VH2-VL2-VL1-CL-Fc; VL1-VL2-VH2-VH1-CH1-CL-Fc; VH1-VH2-VL2-VL1-CH1-CL-Fc; VL1-VL2-VH2-VH1-CL-CH1-Fc; VH1-VH2-VL2-VL1-CL-CH1-Fc; VL1-L1-VL2-L2-VH2-L3-VH1-L4-CH1-Fc; VH1-L1-VH2-L2-VL2-L3-VL1-L4-CH1-Fc; VL1-L1-VL2-L2-VH2-L3-VH1-L4- CL-Fc; VH1-L1-VH2-L2-VL2-L3-VL1-L4-CL-Fc; VL1-L1-VL2-L2-VH2-L3-VH1-L4-CH1-L5-CL-Fc; VH1-L1-VH2-L2-VL2-L3-VL1-L4-CH1-L5-CL-Fc; VL1-L1-VL2-L2-VH2-L3-VH1-L4-CL-L5-CH1-Fc; or VH1-L1-VH2-L2-VL2-L3-VL1-L4-CL-L5-CH1-Fc. In some aspects, the first polypeptide has a structure represented by VH1-VH2-VL2-VL1-CH1-Fc and the second polypeptide has a structure represented by Fc; VL1-VL2-VH2-VH1-CH1-Fc; VH1-VH2-VL2-VL1-CH1-Fc; VL1-VL2-VH2-VH1-CL-Fc; VH1-VH2-VL2-VL1-CL-Fc; VL1-VL2-VH2-VH1-CH1-CL-Fc; VH1-VH2-VL2-VL1-CH1-CL-Fc; VL1-VL2-VH2-VH1-CL-CH1-Fc; VH1-VH2-VL2-VL1-CL-CH1-Fc; VL1-L1-VL2-L2-VH2-L3-VH1-L4-CH1-Fc; VH1-L1-VH2-L2-VL2-L3-VL1-L4-CH1-Fc; VL1-L1-VL2-L2-VH2-L3-VH1-L4-CL-Fc; VH1-L1-VH2-L2-VL2-L3-VL1-L4-CL-Fc; VL1-L1-VL2-L2-VH2-L3-VH1-L4-CH1-L5-CL-Fc; VH1-L1-VH2-L2-VL2-L3-VL1-L4-CH1-L5-CL-Fc; VL1-L1-VL2-L2-VH2-L3-VH1-L4-CL-L5-CH1-Fc; or VH1-L1-VH2-L2-VL2-L3-VL1-L4-CL-L5-CH1-Fc. In some aspects, the first polypeptide has a structure represented by VL1-VL2-VH2-VH1-CL-Fc and the second polypeptide has a structure represented by Fc; VL1-VL2-VH2-VH1-CH1-Fc; VH1-VH2-VL2-VL1-CH1-Fc; VL1-VL2-VH2-VH1-CL-Fc; VH1-VH2-VL2-VL1-CL-Fc; VL1-VL2-VH2-VH1-CH1-CL-Fc; VH1-VH2-VL2-VL1-CH1-CL-Fc; VL1-VL2-VH2-VH1-CL-CH1-Fc; VH1-VH2-VL2-VL1-CL-CH1-Fc; VL1-L1-VL2-L2-VH2-L3-VH1-L4-CH1-Fc; VH1-L1-VH2-L2-VL2-L3-VL1-L4-CH1-Fc; VL1-L1-VL2-L2-VH2-L3-VH1-L4-CL-Fc; VH1-L1-VH2-L2-VL2-L3-VL1-L4-CL-Fc; VL1-L1-VL2-L2-VH2-L3-VH1-L4-CH1-L5-CL-Fc; VH1-L1-VH2-L2-VL2-L3-VL1-L4-CH1-L5-CL-Fc; VL1-L1-VL2-L2-VH2-L3-VH1-L4-CL-L5-CH1-Fc; or VH1-L1-VH2-L2-VL2-L3-VL1-L4-CL-L5-CH1-Fc. In some aspects, the first polypeptide has a structure represented by VH1-VH2-VL2-VL1-CL-Fc and the second polypeptide has a structure represented by Fc; VL1-VL2-VH2-VH1-CH1-Fc; VH1-VH2-VL2-VL1-CH1-Fc; VL1-VL2-VH2-VH1-CL-Fc; VH1-VH2-VL2-VL1-CL-Fc; VL1-VL2-VH2-VH1-CH1-CL-Fc; VH1-VH2-VL2-VL1-CH1-CL-Fc; VL1-VL2-VH2-VH1-CL-CH1-Fc; VH1-VH2-VL2-VL1-CL-CH1-Fc; VL1-L1-VL2-L2-VH2-L3-VH1-L4-CH1-Fc; VH1-L1-VH2-L2-VL2-L3-VL1-L4-CH1-Fc; VL1-L1-VL2-L2-VH2-L3-VH1-L4-CL-Fc; VH1-L1-VH2-L2-VL2-L3-VL1-L4-CL-Fc; VL1-L1-VL2-L2-VH2-L3-VH1-L4-CH1-L5-CL-Fc; VH1-L1-VH2-L2-VL2-L3-VL1-L4-CH1-L5-CL-Fc; VL1-L1-VL2-L2-VH2-L3-VH1-L4-CL-L5-CH1-Fc; or VH1-L1-VH2-L2-VL2-L3-VL1-L4-CL-L5-CH1-Fc. In some aspects, the first polypeptide has a structure represented by VL1-VL2-VH2-VH1-CH1-CL-Fc and the second polypeptide has a structure represented by Fc; VL1-VL2-VH2-VH1-CH1-Fe; VH1-VH2-VL2-VL1-CH1-Fc; VL1-VL2-VH2-VH1-CL-Fc; VH1-VH2-VL2-VL1-CL-Fc; VL1-VL2-VH2-VH1-CH1-CL-Fc; VH1-VH2-VL2-VL1-CH1-CL-Fc; VL1-VL2-VH2-VH1-CL-CH1-Fc; VH1-VH2-VL2-VL1-CL-CH1-Fc; VL1-L1-VL2-L2-VH2-L3-VH1-L4-CH1-Fc; VH1-L1-VH2-L2-VL2-L3-VL1-L4-CH1-Fc; VL1-L1-VL2-L2-VH2-L3-VH1-L4-CL-Fc; VH1-L1-VH2-L2-VL2-L3-VL1-L4-CL-Fc; VL1-L1-VL2-L2-VH2-L3-VH1-L4-CH1-L5-CL-Fc; VH1-L1-VH2-L2-VL2-L3-VL1-L4-CH1-L5-CL-Fc; VL1-L1-VL2-L2-VH2-L3-VH1-L4-CL-L5-CH1-Fc; or VH1-L1-VH2-L2-VL2-L3-VL1-L4-CL-L5-CH1-Fc. In some aspects, the first polypeptide has a structure represented by VH1-VH2-VL2-VL1-CH1-CL-Fc and the second polypeptide has a structure represented by Fc; VL1-VL2-VH2-VH1-CH1-Fe; VH1-VH2-VL2-VL1-CH1-Fc; VL1-VL2-VH2-VH1-CL-Fc; VH1-VH2-VL2-VL1-CL-Fc; VL1-VL2-VH2-VH1-CH1-CL-Fc; VH1-VH2-VL2-VL1-CH1-CL-Fc; VL1-VL2-VH2-VH1-CL-CH1-Fc; VH1-VH2-VL2-VL1-CL-CH1-Fc; VL1-L1-VL2-L2-VH2-L3-VH1-L4-CH1-Fc; VH1-L1-VH2-L2-VL2-L3-VL1-L4-CH1-Fc; VL1-L1-VL2-L2-VH2-L3-VH1-L4-CL-Fc; VH1-L1-VH2-L2-VL2-L3-VL1-L4-CL-Fc; VL1-L1-VL2-L2-VH2-L3-VH1-L4-CH1-L5-CL-Fc; VH1-L1-VH2-L2-VL2-L3-VL1-L4-CH1-L5-CL-Fc; VL1-L1-VL2-L2-VH2-L3-VH1-L4-CL-L5-CH1-Fc; or VH1-L1-VH2-L2-VL2-L3-VL1-L4-CL-L5-CH1-Fc. In some aspects, the first polypeptide has a structure represented by VL1-VL2-VH2-VH1-CL-CH1-Fc and the second polypeptide has a structure represented by Fc; VL1-VL2-VH2-VH1-CH1-Fe; VH1-VH2-VL2-VL1-CH1-Fc; VL1-VL2-VH2-VH1-CL-Fc; VH1-VH2-VL2-VL1-CL-Fc; VL1-VL2-VH2-VH1-CH1-CL-Fc; VH1-VH2-VL2-VL1-CH1-CL-Fc; VL1-VL2-VH2-VH1-CL-CH1-Fc; VH1-VH2-VL2-VL1-CL-CH1-Fc; VL1-L1-VL2-L2-VH2-L3-VH1-L4-CH1-Fc; VH1-L1-VH2-L2-VL2-L3-VL1-L4-CH1-Fc; VL1-L1-VL2-L2-VH2-L3-VH1-L4-CL-Fc; VH1-L1-VH2-L2-VL2-L3-VL1-L4-CL-Fc; VL1-L1-VL2-L2-VH2-L3-VH1-L4-CH1-L5-CL-Fc; VH1-L1-VH2-L2-VL2-L3-VL1-L4-CH1-L5-CL-Fc; VL1-L1-VL2-L2-VH2-L3-VH1-L4-CL-L5-CH1-Fc; or VH1-L1-VH2-L2-VL2-L3-VL1-L4-CL-L5-CH1-Fc. In some aspects, the first polypeptide has a structure represented by VH1-VH2-VL2-VL1-CL-CH1-Fc and the second polypeptide has a structure represented by Fc; VL1-VL2-VH2-VH1-CH1-Fe; VH1-VH2-VL2-VL1-CH1-Fc; VL1-VL2-VH2-VH1-CL-Fc; VH1-VH2-VL2-VL1-CL-Fc; VL1-VL2-VH2-VH1-CH1-CL-Fc; VH1-VH2-VL2-VL1-CH1-CL-Fc; VL1-VL2-VH2-VH1-CL-CH1-Fc; VH1-VH2-VL2-VL1-CL-CH1-Fc; VL1-L1-VL2-L2-VH2-L3-VH1-L4-CH1-Fc; VH1-L1-VH2-L2-VL2-L3-VL1-L4-CH1-Fc; VL1-L1-VL2-L2-VH2-L3-VH1-L4-CL-Fc; VH1-L1-VH2-L2-VL2-L3-VL1-L4-CL-Fc; VL1-L1-VL2-L2-VH2-L3-VH1-L4-CH1-L5-CL-Fc; VH1-L1-VH2-L2-VL2-L3-VL1-L4-CH1-L5-CL-Fc; VL1-L1-VL2-L2-VH2-L3-VH1-L4-CL-L5-CH1-Fc; or VH1-L1-VH2-L2-VL2-L3-VL1-L4-CL-L5-CH1-Fc. In some aspects, the first polypeptide has a structure represented by VL1-L1-VL2-L2-VH2-L3-VH1-L4-CH1-Fc and the second polypeptide has a structure represented by Fc; VL1-VL2-VH2-VH1-CH1-Fc; VH1-VH2-VL2-VL1-CH1-Fc; VL1-VL2-VH2-VH1-CL-Fc; VH1-VH2-VL2-VL1-CL-Fc; VL1-VL2-VH2-VH1-CH1-CL-Fc; VH1-VH2-VL2-VL1-CH1-CL-Fc; VL1-VL2-VH2-VH1-CL-CH1-Fc; VH1-VH2-VL2-VL1-CL-CH1-Fc; VL1-L1-VL2-L2-VH2-L3-VH1-L4-CH1-Fc; VH1-L1-VH2-L2-VL2-L3-VL1-L4-CH1-Fc; VL1-L1-VL2-L2-VH2-L3-VH1-L4-CL-Fc; VH1-L1-VH2-L2-VL2-L3-VL1-L4-CL-Fc; VL1-L1-VL2-L2-VH2-L3-VH1-L4-CH1-L5-CL-Fc; VH1-L1-VH2-L2-VL2-L3-VL1-L4-CH1-L5-CL-Fc; VL1-L1-VL2-L2-VH2-L3-VH1-L4-CL-L5-CH1-Fc; or VH1-L1-VH2-L2-VL2-L3-VL1-L4-CL-L5-CH1-Fc. In some aspects, the first polypeptide has a structure represented by VH1-L1-VH2-L2-VL2-L3-VL1-L4-CH1-Fc and the second polypeptide has a structure represented by Fc; VL1-VL2-VH2-VH1-CH1-Fc; VH1-VH2-VL2-VL1-CH1-Fc; VL1-VL2-VH2-VH1-CL-Fc; VH1-VH2-VL2-VL1-CL-Fc; VL1-VL2-VH2-VH1-CH1-CL-Fc; VH1-VH2-VL2-VL1-CH1-CL-Fc; VL1-VL2-VH2-VH1-CL-CH1-Fc; VH1-VH2-VL2-VL1-CL-CH1-Fc; VL1-L1-VL2-L2-VH2-L3-VH1-L4-CH1-Fc; VH1-L1-VH2-L2-VL2-L3-VL1-L4-CH1-Fc; VL1-L1-VL2-L2-VH2-L3-VH1-L4- CL-Fc; VH1-L1-VH2-L2-VL2-L3-VL1-L4-CL-Fc; VL1-L1-VL2-L2-VH2-L3-VH1-L4-CH1-L5-CL-Fc; VH1-L1-VH2-L2-VL2-L3-VL1-L4-CH1-L5-CL-Fc; VL1-L1-VL2-L2-VH2-L3-VH1-L4-CL-L5-CH1-Fc; or VH1-L1-VH2-L2-VL2-L3-VL1-L4-CL-L5-CH1-Fc. In some aspects, the first polypeptide has a structure represented by VL1-L1-VL2-L2-VH2-L3-VH1-L4-CL-Fc and the second polypeptide has a structure represented by Fc; VL1-VL2-VH2-VH1-CH1-Fc; VH1-VH2-VL2-VL1-CH1-Fc; VL1-VL2-VH2-VH1-CL-Fc; VH1-VH2-VL2-VL1-CL-Fc; VL1-VL2-VH2-VH1-CH1-CL-Fc; VH1-VH2-VL2-VL1-CH1-CL-Fc; VL1-VL2-VH2-VH1-CL-CH1-Fc; VH1-VH2-VL2-VL1-CL-CH1-Fc; VL1-L1-VL2-L2-VH2-L3-VH1-L4-CH1-Fc; VH1-L1-VH2-L2-VL2-L3-VL1-L4-CH1-Fc; VL1-L1-VL2-L2-VH2-L3-VH1-L4- CL-Fc; VH1-L1-VH2-L2-VL2-L3-VL1-L4-CL-Fc; VL1-L1-VL2-L2-VH2-L3-VH1-L4-CH1-L5-CL-Fc; VH1-L1-VH2-L2-VL2-L3-VL1-L4-CH1-L5-CL-Fc; VL1-L1-VL2-L2-VH2-L3-VH1-L4-CL-L5-CH1-Fc; or VH1-L1-VH2-L2-VL2-L3-VL1-L4-CL-L5-CH1-Fc. In some aspects, the first polypeptide has a structure represented by VH1-L1-VH2-L2-VL2-L3-VL1-L4-CL-Fc and the second polypeptide has a structure represented by Fc; VL1-VL2-VH2-VH1-CH1-Fc; VH1-VH2-VL2-VL1-CH1-Fc; VL1-VL2-VH2-VH1-CL-Fc; VH1-VH2-VL2-VL1-CL-Fc; VL1-VL2-VH2-VH1-CH1-CL-Fc; VH1-VH2-VL2-VL1-CH1-CL-Fc; VL1-VL2-VH2-VH1-CL-CH1-Fc; VH1-VH2-VL2-VL1-CL-CH1-Fc; VL1-L1-VL2-L2-VH2-L3-VH1-L4-CH1-Fc; VH1-L1-VH2-L2-VL2-L3-VL1-L4-CH1-Fc; VL1-L1-VL2-L2-VH2-L3-VH1-L4- CL-Fc; VH1-L1-VH2-L2-VL2-L3-VL1-L4-CL-Fc; VL1-L1-VL2-L2-VH2-L3-VH1-L4-CH1-L5-CL-Fc; VH1-L1-VH2-L2-VL2-L3-VL1-L4-CH1-L5-CL-Fc; VL1-L1-VL2-L2-VH2-L3-VH1-L4-CL-L5-CH1-Fc; or VH1-L1-VH2-L2-VL2-L3-VL1-L4-CL-L5-CH1-Fc. In some aspects, the first polypeptide has a structure represented by VL1-L1-VL2-L2-VH2-L3-VH1-L4-CH1-L5-CL-Fc and the second polypeptide has a structure represented by Fc; VL1-VL2-VH2-VH1-CH1-Fc; VH1-VH2-VL2-VL1-CH1-Fc; VL1-VL2-VH2-VH1-CL-Fc; VH1-VH2-VL2-VL1-CL-Fc; VL1-VL2-VH2-VH1-CH1-CL-Fc; VH1-VH2-VL2-VL1-CH1-CL-Fc; VL1-VL2-VH2-VH1-CL-CH1-Fc; VH1-VH2-VL2-VL1-CL-CH1-Fc; VL1-L1-VL2-L2-VH2-L3-VH1-L4-CH1-Fc; VH1-L1-VH2-L2-VL2-L3-VL1-L4-CH1-Fc; VL1-L1-VL2-L2-VH2-L3- VH1-L4-CL-Fc; VH1-L1-VH2-L2-VL2-L3-VL1-L4-CL-Fc; VL1-L1-VL2-L2-VH2-L3-VH1-L4-CH1-L5-CL-Fc; VH1-L1-VH2-L2-VL2-L3-VL1-L4-CH1-L5-CL-Fc; VL1-L1-VL2-L2-VH2-L3-VH1-L4-CL-L5-CH1-Fc; or VH1-L1-VH2-L2-VL2-L3-VL1-L4-CL-L5-CH1-Fc. In some aspects, the first polypeptide has a structure represented by VH1-L1-VH2-L2-VL2-L3-VL1-L4-CH1-L5-CL-Fc and the second polypeptide has a structure represented by Fc; VL1-VL2-VH2-VH1-CH1-Fc; VH1-VH2-VL2-VL1-CH1-Fc; VL1-VL2-VH2-VH1-CL-Fc; VH1-VH2-VL2-VL1-CL-Fc; VL1-VL2-VH2-VH1-CH1-CL-Fc; VH1-VH2-VL2-VL1-CH1-CL-Fc; VL1-VL2-VH2-VH1-CL-CH1-Fc; VH1-VH2-VL2-VL1-CL-CH1-Fc; VL1-L1-VL2-L2-VH2-L3-VH1-L4-CH1-Fc; VH1-L1-VH2-L2-VL2-L3-VL1-L4-CH1-Fc; VL1-L1-VL2-L2-VH2-L3-VH1-L4-CL-Fc; VH1-L1-VH2-L2-VL2-L3-VL1-L4-CL-Fc; VL1-L1-VL2-L2-VH2-L3-VH1-L4-CH1-L5-CL-Fc; VH1-L1-VH2-L2-VL2-L3-VL1-L4-CH1-L5-CL-Fc; VL1-L1-VL2-L2-VH2-L3-VH1-L4-CL-L5-CH1-Fc; or VH1-L1-VH2-L2-VL2-L3-VL1-L4-CL-L5-CH1-Fc. In some aspects, the first polypeptide has a structure represented by VL1-L1-VL2-L2-VH2-L3-VH1-L4-CL-L5-CH1-Fc and the second polypeptide has a structure represented by Fc; VL1-VL2-VH2-VH1-CH1-Fc; VH1-VH2-VL2-VL1-CH1-Fc; VL1-VL2-VH2-VH1-CL-Fc; VH1-VH2-VL2-VL1-CL-Fc; VL1-VL2-VH2-VH1-CH1-CL-Fc; VH1-VH2-VL2-VL1-CH1-CL-Fc; VL1-VL2-VH2-VH1-CL-CH1-Fc; VH1-VH2-VL2-VL1-CL-CH1-Fc; VL1-L1-VL2-L2-VH2-L3-VH1-L4-CH1-Fc; VH1-L1-VH2-L2-VL2-L3-VL1-L4-CH1-Fc; VL1-L1-VL2-L2-VH2-L3-VH1-L4-CL-Fc; VH1-L1-VH2-L2-VL2-L3-VL1-L4-CL-Fc; VL1-L1-VL2-L2-VH2-L3-VH1-L4-CH1-L5-CL-Fc; VH1-L1-VH2-L2-VL2-L3-VL1-L4-CH1-L5-CL-Fc; VL1-L1-VL2-L2-VH2-L3-VH1-L4-CL- L5-CH1-Fc; or VH1-L1-VH2-L2-VL2-L3-VL1-L4-CL-L5-CH1-Fc. In some aspects, the first polypeptide has a structure represented by VH1-L1-VH2-L2-VL2-L3-VL1-L4-CL-L5-CH1-Fc and the second polypeptide has a structure represented by Fc; VL1-VL2-VH2-VH1-CH1-Fc; VH1-VH2-VL2-VL1-CH1-Fc; VL1-VL2-VH2-VH1-CL-Fc; VH1-VH2-VL2-VL1-CL-Fc; VL1-VL2-VH2-VH1-CH1-CL-Fc; VH1-VH2-VL2-VL1-CH1-CL-Fc; VL1-VL2-VH2-VH1-CL-CH1-Fc; VH1-VH2-VL2-VL1-CL-CH1-Fc; VL1-L1-VL2-L2-VH2-L3-VH1-L4-CH1-Fc; VH1-L1-VH2-L2-VL2-L3-VL1-L4-CH1-Fc; VL1-L1-VL2-L2-VH2-L3-VH1-L4-CL-Fc; VH1-L1-VH2-L2-VL2-L3-VL1-L4-CL-Fc; VL1-L1-VL2-L2-VH2-L3-VH1-L4-CH1-L5-CL-Fc; VH1-L1-VH2-L2-VL2-L3-VL1-L4-CH1-L5-CL-Fc; VL1-L1-VL2-L2-VH2-L3-VH1-L4-CL-L5-CH1-Fc; or VH1-L1-VH2-L2-VL2-L3-VL1-L4-CL-L5-CH1-Fc. The VL1, VL2, VH1, and/or VH2 may specifically bind to A2AR, APRIL, ATPDase, BAFF, BAFFR, BCMA, BlyS, BTK, BTLA, B7DC, B7H1, B7H2, B7H3, B7H4, B7H5, B7H6, B7H7, B7RP1, B7-4, C3, C5, CCL2, CCL3, CCL4, CCL5, CCL7, CCL8, CCL11, CCL15, CCL17, CCL19, CCL20, CCL21, CCL25 CCR3, CCR4, CD3, CD16A, CD19, CD20, CD24, CD27, CD28, CD30, CD38, CD39, CD40, CD40L, CD47, CD52, CD70, CD80, CD86, CD123, CD133, CD137, CD137L, CD160, CD272, CEACAM5, CLEC9, CLEC91, CRTH2, CSF-1, CSF-2, CSF-3, CXCL1, CXCL2, CXCL4, CXCL12, CXCL13, CXCR3, cMet, CTLA4, DLL3, DLL4, DNGR-1, E-cadherin, EGFR, ENTPD1, EpCAM, FCER1, FCER1A, FCER2, FGFR, FLAP, FOLH1, Gi24, GITR, GITRL, GPR5, GP100, GPRC5D, HER2, HER3, ICOSL, ICOS, HHLA2, HMGB1, HVEM, IDO, IFNa, IgE, IGF1R, IL2Rbeta, IL1, ILIA, IL1B, IL1F10, IL2, IL4, IL4Ra, IL5, IL5R, IL6, IL7, IL7Ra, IL8, IL9, IL9R, IL10, rhIL1O, IL12, IL13, IL13Ra1, IL13Ra2, IL15, IL17, IL17Rb, IL18, IL22, IL23, IL25, IL7, IL33, IL35, ITGB4, ITK, KIR, LAG3, LAMP1, leptin, LPFS2, MHC class II, MUC-1, MUC-16, NCR3LG1, NKG2D, NKp46, NTPDase-1, OX40, OX40L, PD-1, PD-L1, PD-L2, PROM1, S152, SIRPalpha, SISP1, SLC, SPG64, ST2, STEAP1, STEAP2, Syk kinase, STEAP1, TROP2, TACI, TDO, TGFBETA, T14, TIGIT, TIM3, TLR, TLR2, TLR4, TLR5, TLR9, TMEF1, TNFa, TNFRSF7, Tp55, TREM1, TSLP, TSLPR, TWEAK, VEGF, VISTA, Vstm3, or WUCAM. For the avoidance of doubt, all the antigen binding polypeptide complex structures described herein can be combined with any one or more of the targets described herein. Any and all disclosure herein in relation to targets for antigen binding polypeptides of the invention is generally applicable, and applies equally and without reservation to each and every antigen binding polypeptide and antigen binding polypeptide complex described herein. For the avoidance of doubt, the VL1, VL2, VH1, and/or VH2 of each and every antigen binding polypeptide and antigen binding polypeptide complex described herein may independently bind to any one of said particularly preferred targets. Any and all disclosure herein in relation to targets for antigen binding polypeptides of the invention is generally applicable, and applies equally and without reservation to each and every antigen binding polypeptide and antigen binding polypeptide complex described herein. For the avoidance of doubt, the VL1, VL2, VH1, and/or VH2 of each and every antigen binding polypeptide and antigen binding polypeptide complex described herein may independently bind to any one of said particularly preferred targets.

[0163] In some aspects, the antigen binding polypeptide complex comprising a first polypeptide and a second polypeptide; wherein the first polypeptide has a structure represented by VL1-VL2-VH2-VH1; VH1-VH2-VL2-VL1; VL1-L1-VL2-L2-VH2-L3-VH1; VH1-L1-VH2-L2-VL2-L3-VL1; VL1-VL2-VH2-VH1-Fc; VH1-VH2-VL2-VL1-Fc; VL1-L1-VL2-L2-VH2-L3-VH1-Fc; VH1-L1-VH2-L2-VL2-L3-VL1-Fc; VL1-L1-VL2-L2-VH2-L3-VH1-L4-Fc; VH1-L1-VH2-L2-VL2-L3-VL1-L4-Fc; VL1-VL2-VH2-VH1-CH1; VH1-VH2-VL2-VL1-CH1; VL1-VL2-VH2-VH1-CL; VH1-VH2-VL2-VL1-CL; VL1-VL2-VH2-VH1-CH1-CL; VH1-VH2-VL2-VL1-CH1-CL; VL1-VL2-VH2-VH1-CL-CH1; VH1-VH2-VL2-VL1-CL-CH1; VL1-L1-VL2-L2-VH2-L3-VH1-L4-CH1; VH1-L1-VH2-L2-VL2-L3-VL1-L4-CH1; VL1-L1-VL2-L2-VH2-L3-VH1-L4-CL; VH1-L1-VH2-L2-VL2-L3-VL1-L4-CL; VL1-L1-VL2-L2-VH2-L3- VH1-L4-CH1-L5-CL; VH1-L1-VH2-L2-VL2-L3-VL1-L4-CH1-L5-CL; VL1-L1-VL2-L2-VH2-L3-VH1-L4-CL-L5-CH1; VH1-L1-VH2-L2-VL2-L3-VL1-L4-CL-L5-CH1; VL1-VL2-VH2-VH1-CH1-Fc; VH1-VH2-VL2-VL1-CH1-Fc; VL1-VL2-VH2-VH1-CL-Fc; VH1-VH2-VL2-VL1-CL-Fc; VL1-VL2-VH2-VH1-CH1-CL-Fc; VH1-VH2-VL2-VL1-CH1-CL-Fc; VL1-VL2-VH2-VH1-CL-CH1-Fc; VH1-VH2-VL2-VL1-CL-CH1-Fc; VL1-L1-VL2-L2-VH2-L3-VH1-L4-CH1-Fc; VH1-L1-VH2-L2-VL2-L3-VL1-L4-CH1-Fc; VL1-L1-VL2-L2-VH2-L3-VH1-L4-CL-Fc; VH1-L1-VH2-L2-VL2-L3-VL1-L4-CL-Fc; VL1-L1-VL2-L2-VH2-L3-VH1-L4-CH1-L5-CL-Fc; VH1-L1-VH2-L2-VL2-L3-VL1-L4-CH1-L5-CL-Fc; VL1-L1-VL2-L2-VH2-L3-VH1-L4-CL-L5-CH1-Fc; or VH1-L1-VH2-L2-VL2-L3-VL1-L4-CL-L5-CH1-Fc; wherein the second polypeptide has a structure represented by Fc; VL1-VL2-VH2-VH1; VH1-VH2-VL2-VL1; VL1-L1-VL2-L2-VH2-L3-VH1; VH1-L1-VH2-L2-VL2-L3-VL1; VL1-VL2-VH2-VH1-Fc; VH1-VH2-VL2-VL1-Fc; VL1-L1-VL2-L2-VH2-L3-VH1-Fc; VH1-L1-VH2-L2-VL2-L3-VL1-Fc; VL1-L1-VL2-L2-VH2-L3-VH1-L4-Fc; VH1-L1-VH2-L2-VL2-L3-VL1-L4-Fc; VL1-VL2-VH2-VH1-CH1; VH1-VH2-VL2-VL1-CH1; VL1-VL2-VH2-VH1-CL; VH1-VH2-VL2-VL1-CL; VL1-VL2-VH2-VH1-CH1-CL; VH1-VH2-VL2-VL1-CH1-CL; VL1-VL2-VH2-VH1-CL-CH1; VH1-VH2-VL2-VL1-CL-CH1; VL1-L1-VL2-L2-VH2-L3-VH1-L4-CH1; VH1-L1-VH2-L2-VL2-L3-VL1-L4-CH1; VL1- L1-VL2-L2-VH2-L3-VH1-L4-CL; VH1-L1-VH2-L2-VL2-L3-VL1-L4-CL; VL1-L1-VL2-L2-VH2-L3-VH1-L4-CH1- L5-CL; VH1-L1-VH2-L2-VL2-L3-VL1-L4-CH1-L5-CL; VL1-L1-VL2-L2-VH2-L3-VH1-L4-CL-L5-CH1; VH1-L1-VH2-L2-VL2-L3-VL1-L4-CL-L5-CH1; VL1-VL2-VH2-VH1-CH1-Fc; VH1-VH2-VL2-VL1-CH1-Fc; VL1-VL2-VH2-VH1-CL-Fc; VH1-VH2-VL2-VL1-CL-Fc; VL1-VL2-VH2-VH1-CH1-CL-Fc; VH1-VH2-VL2-VL1-CH1-CL-Fc; VL1-VL2-VH2-VH1-CL-CH1-Fc; VH1-VH2-VL2-VL1-CL-CH1-Fc; VL1-L1-VL2-L2-VH2-L3-VH1-L4-CH1-Fc; VH1-L1-VH2-L2-VL2-L3-VL1-L4-CH1-Fc; VL1-L1-VL2-L2-VH2-L3-VH1-L4-CL-Fc; VH1-L1-VH2-L2-VL2-L3-VL1-L4-CL-Fc; VL1-L1-VL2-L2-VH2-L3-VH1-L4-CH1-L5-CL-Fc; VH1-L1-VH2-L2-VL2-L3-VL1-L4-CH1-L5-CL-Fc; VL1-L1-VL2-L2-VH2-L3-VH1-L4-CL-L5-CH1-Fc; or VH1-L1-VH2-L2-VL2-L3-VL1-L4-CL-L5-CH1-Fc; wherein VL1 is a first immunoglobulin light chain variable region that specifically binds to A2AR, APRIL, ATPDase, BAFF, BAFFR, BCMA, BlyS, BTK, BTLA, B7DC, B7H1, B7H2, B7H3, B7H4, B7H5, B7H6, B7H7, B7RP1, B7-4, C3, C5, CCL2, CCL3, CCL4, CCL5, CCL7, CCL8, CCL11, CCL15, CCL17, CCL19, CCL20, CCL21, CCL25 CCR3, CCR4, CD3, CD16A, CD19, CD20, CD24, CD27, CD28, CD30, CD38, CD39, CD40, CD40L, CD47, CD52, CD70, CD80, CD86, CD123, CD133, CD137, CD137L, CD160, CD272, CEACAM5, CLEC9, CLEC91, CRTH2, CSF-1, CSF-2, CSF-3, CXCL1, CXCL2, CXCL4, CXCL12, CXCL13, CXCR3, cMet, CTLA4, DLL3, DLL4, DNGR-1, E-cadherin, EGFR, ENTPD1, EpCAM, FCER1, FCER1A, FCER2, FGFR, FLAP, FOLH1, Gi24, GITR, GITRL, GPR5, GP100, GPRC5D, HER2, HER3, ICOSL, ICOS, HHLA2, HMGB1, HVEM, IDO, IFNa, IgE, IGF1R, IL2Rbeta, IL1, ILIA, IL1B, IL1F10, IL2, IL4, IL4Ra, IL5, IL5R, IL6, IL7, IL7Ra, IL8, IL9, IL9R, IL10, rhIL1O, IL12, IL13, IL13Ra1, IL13Ra2, IL15, IL17, IL17Rb, IL18, IL22, IL23, IL25, IL7, IL33, IL35, ITGB4, ITK, KIR, LAG3, LAMP1, leptin, LPFS2, MHC class II, MUC-1, MUC-16, NCR3LG1, NKG2D, NKp46, NTPDase-1, OX40, OX40L, PD-1, PD-L1, PD-L2, PROM1, S152, SIRPalpha, SISP1, SLC, SPG64, ST2, STEAP1, STEAP2, Syk kinase, STEAP1, TROP2, TACI, TDO, TGFBETA, T14, TIGIT, TIM3, TLR, TLR2, TLR4, TLR5, TLR9, TMEF1, TNFa, TNFRSF7, Tp55, TREM1, TSLP, TSLPR, TWEAK, VEGF, VISTA, Vstm3, or WUCAM; VL2 is a second immunoglobulin light chain variable region that specifically binds to A2AR, APRIL, ATPDase, BAFF, BAFFR, BCMA, BlyS, BTK, BTLA, B7DC, B7H1, B7H2, B7H3, B7H4, B7H5, B7H6, B7H7, B7RP1, B7-4, C3, C5, CCL2, CCL3, CCL4, CCL5, CCL7, CCL8, CCL11, CCL15, CCL17, CCL19, CCL20, CCL21, CCL25 CCR3, CCR4, CD3, CD16A, CD19, CD20, CD24, CD27, CD28, CD30, CD38, CD39, CD40, CD40L, CD47, CD52, CD70, CD80, CD86, CD123, CD133, CD137, CD137L, CD160, CD272, CEACAM5, CLEC9, CLEC91, CRTH2, CSF-1, CSF-2, CSF-3, CXCL1, CXCL2, CXCL4, CXCL12, CXCL13, CXCR3, cMet, CTLA4, DLL3, DLL4, DNGR-1, E-cadherin, EGFR, ENTPD1, EpCAM, FCER1, FCER1A, FCER2, FGFR, FLAP, FOLH1, Gi24, GITR, GITRL, GPR5, GP100, GPRC5D, HER2, HER3, ICOSL, ICOS, HHLA2, HMGB1, HVEM, IDO, IFNa, IgE, IGF1R, IL2Rbeta, IL1, ILIA, IL1B, IL1F10, IL2, IL4, IL4Ra, IL5, IL5R, IL6, IL7, IL7Ra, IL8, IL9, IL9R, IL10, rhIL1O, IL12, IL13, IL13Ra1, IL13Ra2, IL15, IL17, IL17Rb, IL18, IL22, IL23, IL25, IL7, IL33, IL35, ITGB4, ITK, KIR, LAG3, LAMP1, leptin, LPFS2, MHC class II, MUC-1, MUC-16, NCR3LG1, NKG2D, NKp46, NTPDase-1, OX40, OX40L, PD-1, PD-L1, PD-L2, PROM1, S152, SIRPalpha, SISP1, SLC, SPG64, ST2, STEAP1, STEAP2, Syk kinase, STEAP1, TROP2, TACI, TDO, TGFBETA, T14, TIGIT, TIM3, TLR, TLR2, TLR4, TLR5, TLR9, TMEF1, TNFa, TNFRSF7, Tp55, TREM1, TSLP, TSLPR, TWEAK, VEGF, VISTA, Vstm3, or WUCAM; VH1 is a first immunoglobulin heavy chain variable region that specifically binds to A2AR, APRIL, ATPDase, BAFF, BAFFR, BCMA, BlyS, BTK, BTLA, B7DC, B7H1, B7H2, B7H3, B7H4, B7H5, B7H6, B7H7, B7RP1, B7-4, C3, C5, CCL2, CCL3, CCL4, CCL5, CCL7, CCL8, CCL11, CCL15, CCL17, CCL19, CCL20, CCL21, CCL25 CCR3, CCR4, CD3, CD16A, CD19, CD20, CD24, CD27, CD28, CD30, CD38, CD39, CD40, CD40L, CD47, CD52, CD70, CD80, CD86, CD123, CD133, CD137, CD137L, CD160, CD272, CEACAM5, CLEC9, CLEC91, CRTH2, CSF-1, CSF-2, CSF-3, CXCL1, CXCL2, CXCL4, CXCL12, CXCL13, CXCR3, cMet, CTLA4, DLL3, DLL4, DNGR-1, E-cadherin, EGFR, ENTPD1, EpCAM, FCER1, FCER1A, FCER2, FGFR, FLAP, FOLH1, Gi24, GITR, GITRL, GPR5, GP100, GPRC5D, HER2, HER3, ICOSL, ICOS, HHLA2, HMGB1, HVEM, IDO, IFNa, IgE, IGF1R, IL2Rbeta, IL1, ILIA, IL1B, IL1F10, IL2, IL4, IL4Ra, IL5, IL5R, IL6, IL7, IL7Ra, IL8, IL9, IL9R, IL10, rhIL1O, IL12, IL13, IL13Ra1, IL13Ra2, IL15, IL17, IL17Rb, IL18, IL22, IL23, IL25, IL7, IL33, IL35, ITGB4, ITK, KIR, LAG3, LAMP1, leptin, LPFS2, MHC class II, MUC-1, MUC-16, NCR3LG1, NKG2D, NKp46, NTPDase-1, OX40, OX40L, PD-1, PD-L1, PD-L2, PROM1, S152, SIRPalpha, SISP1, SLC, SPG64, ST2, STEAP1, STEAP2, Syk kinase, STEAP1, TROP2, TACI, TDO, TGFBETA, T14, TIGIT, TIM3, TLR, TLR2, TLR4, TLR5, TLR9, TMEF1, TNFa, TNFRSF7, Tp55, TREM1, TSLP, TSLPR, TWEAK, VEGF, VISTA, Vstm3, or WUCAM; VH2 is a second immunoglobulin heavy chain variable region that specifically binds to A2AR, APRIL, ATPDase, BAFF, BAFFR, BCMA, BlyS, BTK, BTLA, B7DC, B7H1, B7H2, B7H3, B7H4, B7H5, B7H6, B7H7, B7RP1, B7-4, C3, C5, CCL2, CCL3, CCL4, CCL5, CCL7, CCL8, CCL11, CCL15, CCL17, CCL19, CCL20, CCL21, CCL25 CCR3, CCR4, CD3, CD16A, CD19, CD20, CD24, CD27, CD28, CD30, CD38, CD39, CD40, CD40L, CD47, CD52, CD70, CD80, CD86, CD123, CD133, CD137, CD137L, CD160, CD272, CEACAM5, CLEC9, CLEC91, CRTH2, CSF-1, CSF-2, CSF-3, CXCL1, CXCL2, CXCL4, CXCL12, CXCL13, CXCR3, cMet, CTLA4, DLL3, DLL4, DNGR-1, E-cadherin, EGFR, ENTPD1, EpCAM, FCER1, FCER1A, FCER2, FGFR, FLAP, FOLH1, Gi24, GITR, GITRL, GPR5, GP100, GPRC5D, HER2, HER3, ICOSL, ICOS, HHLA2, HMGB1, HVEM, IDO, IFNa, IgE, IGF1R, IL2Rbeta, IL1, ILIA, IL1B, IL1F10, IL2, IL4, IL4Ra, IL5, IL5R, IL6, IL7, IL7Ra, IL8, IL9, IL9R, IL10, rhIL1O, IL12, IL13, IL13Ra1, IL13Ra2, IL15, IL17, IL17Rb, IL18, IL22, IL23, IL25, IL7, IL33, IL35, ITGB4, ITK, KIR, LAG3, LAMP1, leptin, LPFS2, MHC class II, MUC-1, MUC-16, NCR3LG1, NKG2D, NKp46, NTPDase-1, OX40, OX40L, PD-1, PD-L1, PD-L2, PROM1, S152, SIRPalpha, SISP1, SLC, SPG64, ST2, STEAP1, STEAP2, Syk kinase, STEAP1, TROP2, TACI, TDO, TGFBETA, T14, TIGIT, TIM3, TLR, TLR2, TLR4, TLR5, TLR9, TMEF1, TNFa, TNFRSF7, Tp55, TREM1, TSLP, TSLPR, TWEAK, VEGF, VISTA, Vstm3, or WUCAM; Fc is a region comprising an immunoglobulin heavy chain constant region 2 (CH2), an immunoglobulin heavy chain constant region 3 (CH3), and optionally, an immunoglobulin hinge; CH1 is an immunoglobulin heavy chain constant region 1; CL is an immunoglobulin light chain constant region; and L1, L2, L3, L4 and L5 are amino acid linkers. In other aspects, the invention is directed to an antigen binding polypeptide or antigen binding polypeptide complex comprising a polypeptide having a structure represented by VL1-VL2-VH2-VH1-Fc-Fc; VH1-VH2-VL2-VL1-Fc-Fc; VL1-L1-VL2-L2-VH2-L3-VH1-Fc-Fc; VH1-L1-VH2-L2-VL2-L3-VL1-Fc-Fc; VL1-L1-VL2-L2-VH2-L3-VH1-L4-Fc-Fc; VH1-L1-VH2-L2-VL2-L3-VL1-L4-Fc-Fc; VL1-L1-VL2-L2-VH2-L3-VH1-L4-Fc-L5-Fc; or VH1-L1-VH2-L2-VL2-L3-VL1-L4-Fc-L5-Fc; wherein VL1 is a first immunoglobulin light chain variable region that specifically binds to A2AR, APRIL, ATPDase, BAFF, BAFFR, BCMA, BlyS, BTK, BTLA, B7DC, B7H1, B7H2, B7H3, B7H4, B7H5, B7H6, B7H7, B7RP1, B7-4, C3, C5, CCL2, CCL3, CCL4, CCL5, CCL7, CCL8, CCL11, CCL15, CCL17, CCL19, CCL20, CCL21, CCL25 CCR3, CCR4, CD3, CD16A, CD19, CD20, CD24, CD27, CD28, CD30, CD38, CD39, CD40, CD40L, CD47, CD52, CD70, CD80, CD86, CD123, CD133, CD137, CD137L, CD160, CD272, CEACAM5, CLEC9, CLEC91, CRTH2, CSF-1, CSF-2, CSF-3, CXCL1, CXCL2, CXCL4, CXCL12, CXCL13, CXCR3, cMet, CTLA4, DLL3, DLL4, DNGR-1, E-cadherin, EGFR, ENTPD1, EpCAM, FCER1, FCER1A, FCER2, FGFR, FLAP, FOLH1, Gi24, GITR, GITRL, GPR5, GP100, GPRC5D, HER2, HER3, ICOSL, ICOS, HHLA2, HMGB1, HVEM, IDO, IFNa, IgE, IGF1R, IL2Rbeta, IL1, ILIA, IL1B, IL1F10, IL2, IL4, IL4Ra, IL5, IL5R, IL6, IL7, IL7Ra, IL8, IL9, IL9R, IL10, rhIL1O, IL12, IL13, IL13Ra1, IL13Ra2, IL15, IL17, IL17Rb, IL18, IL22, IL23, IL25, IL7, IL33, IL35, ITGB4, ITK, KIR, LAG3, LAMP1, leptin, LPFS2, MHC class II, MUC-1, MUC-16, NCR3LG1, NKG2D, NKp46, NTPDase-1, OX40, OX40L, PD-1, PD-L1, PD-L2, PROM1, S152, SIRPalpha, SISP1, SLC, SPG64, ST2, STEAP1, STEAP2, Syk kinase, STEAP1, TROP2, TACI, TDO, TGFBETA, T14, TIGIT, TIM3, TLR, TLR2, TLR4, TLR5, TLR9, TMEF1, TNFa, TNFRSF7, Tp55, TREM1, TSLP, TSLPR, TWEAK, VEGF, VISTA, Vstm3, or WUCAM; VL2 is a second immunoglobulin light chain variable region that specifically binds to A2AR, APRIL, ATPDase, BAFF, BAFFR, BCMA, BlyS, BTK, BTLA, B7DC, B7H1, B7H2, B7H3, B7H4, B7H5, B7H6, B7H7, B7RP1, B7-4, C3, C5, CCL2, CCL3, CCL4, CCL5, CCL7, CCL8, CCL11, CCL15, CCL17, CCL19, CCL20, CCL21, CCL25 CCR3, CCR4, CD3, CD16A, CD19, CD20, CD24, CD27, CD28, CD30, CD38, CD39, CD40, CD40L, CD47, CD52, CD70, CD80, CD86, CD123, CD133, CD137, CD137L, CD160, CD272, CEACAM5, CLEC9, CLEC91, CRTH2, CSF-1, CSF-2, CSF-3, CXCL1, CXCL2, CXCL4, CXCL12, CXCL13, CXCR3, cMet, CTLA4, DLL3, DLL4, DNGR-1, E-cadherin, EGFR, ENTPD1, EpCAM, FCER1, FCER1A, FCER2, FGFR, FLAP, FOLH1, Gi24, GITR, GITRL, GPR5, GP100, GPRC5D, HER2, HER3, ICOSL, ICOS, HHLA2, HMGB1, HVEM, IDO, IFNa, IgE, IGF1R, IL2Rbeta, IL1, ILIA, IL1B, IL1F10, IL2, IL4, IL4Ra, IL5, IL5R, IL6, IL7, IL7Ra, IL8, IL9, IL9R, IL10, rhIL1O, IL12, IL13, IL13Ra1, IL13Ra2, IL15, IL17, IL17Rb, IL18, IL22, IL23, IL25, IL7, IL33, IL35, ITGB4, ITK, KIR, LAG3, LAMP1, leptin, LPFS2, MHC class II, MUC-1, MUC-16, NCR3LG1, NKG2D, NKp46, NTPDase-1, OX40, OX40L, PD-1, PD-L1, PD-L2, PROM1, S152, SIRPalpha, SISP1, SLC, SPG64, ST2, STEAP1, STEAP2, Syk kinase, STEAP1, TROP2, TACI, TDO, TGFBETA, T14, TIGIT, TIM3, TLR, TLR2, TLR4, TLR5, TLR9, TMEF1, TNFa, TNFRSF7, Tp55, TREM1, TSLP, TSLPR, TWEAK, VEGF, VISTA, Vstm3, or WUCAM; VH1 is a first immunoglobulin heavy chain variable region that specifically binds to A2AR, APRIL, ATPDase, BAFF, BAFFR, BCMA, BlyS, BTK, BTLA, B7DC, B7H1, B7H2, B7H3, B7H4, B7H5, B7H6, B7H7, B7RP1, B7-4, C3, C5, CCL2, CCL3, CCL4, CCL5, CCL7, CCL8, CCL11, CCL15, CCL17, CCL19, CCL20, CCL21, CCL25 CCR3, CCR4, CD3, CD16A, CD19, CD20, CD24, CD27, CD28, CD30, CD38, CD39, CD40, CD40L, CD47, CD52, CD70, CD80, CD86, CD123, CD133, CD137, CD137L, CD160, CD272, CEACAM5, CLEC9, CLEC91, CRTH2, CSF-1, CSF-2, CSF-3, CXCL1, CXCL2, CXCL4, CXCL12, CXCL13, CXCR3, cMet, CTLA4, DLL3, DLL4, DNGR-1, E-cadherin, EGFR, ENTPD1, EpCAM, FCER1, FCER1A, FCER2, FGFR, FLAP, FOLH1, Gi24, GITR, GITRL, GPR5, GP100, GPRC5D, HER2, HER3, ICOSL, ICOS, HHLA2, HMGB1, HVEM, IDO, IFNa, IgE, IGF1R, IL2Rbeta, IL1, ILIA, IL1B, IL1F10, IL2, IL4, IL4Ra, IL5, IL5R, IL6, IL7, IL7Ra, IL8, IL9, IL9R, IL10, rhIL1O, IL12, IL13, IL13Ra1, IL13Ra2, IL15, IL17, IL17Rb, IL18, IL22, IL23, IL25, IL7, IL33, IL35, ITGB4, ITK, KIR, LAG3, LAMP1, leptin, LPFS2, MHC class II, MUC-1, MUC-16, NCR3LG1, NKG2D, NKp46, NTPDase-1, OX40, OX40L, PD-1, PD-L1, PD-L2, PROM1, S152, SIRPalpha, SISP1, SLC, SPG64, ST2, STEAP1, STEAP2, Syk kinase, STEAP1, TROP2, TACI, TDO, TGFBETA, T14, TIGIT, TIM3, TLR, TLR2, TLR4, TLR5, TLR9, TMEF1, TNFa, TNFRSF7, Tp55, TREM1, TSLP, TSLPR, TWEAK, VEGF, VISTA, Vstm3, or WUCAM; VH2 is a second immunoglobulin heavy chain variable region that specifically binds to A2AR, APRIL, ATPDase, BAFF, BAFFR, BCMA, BlyS, BTK, BTLA, B7DC, B7H1, B7H2, B7H3, B7H4, B7H5, B7H6, B7H7, B7RP1, B7-4, C3, C5, CCL2, CCL3, CCL4, CCL5, CCL7, CCL8, CCL11, CCL15, CCL17, CCL19, CCL20, CCL21, CCL25 CCR3, CCR4, CD3, CD16A, CD19, CD20, CD24, CD27, CD28, CD30, CD38, CD39, CD40, CD40L, CD47, CD52, CD70, CD80, CD86, CD123, CD133, CD137, CD137L, CD160, CD272, CEACAM5, CLEC9, CLEC91, CRTH2, CSF-1, CSF-2, CSF-3, CXCL1, CXCL2, CXCL4, CXCL12, CXCL13, CXCR3, cMet, CTLA4, DLL3, DLL4, DNGR-1, E-cadherin, EGFR, ENTPD1, EpCAM, FCER1, FCER1A, FCER2, FGFR, FLAP, FOLH1, Gi24, GITR, GITRL, GPR5, GP100, GPRC5D, HER2, HER3, ICOSL, ICOS, HHLA2, HMGB1, HVEM, IDO, IFNa, IgE, IGF1R, IL2Rbeta, IL1, ILIA, IL1B, IL1F10, IL2, IL4, IL4Ra, IL5, IL5R, IL6, IL7, IL7Ra, IL8, IL9, IL9R, IL10, rhIL1O, IL12, IL13, IL13Ra1, IL13Ra2, IL15, IL17, IL17Rb, IL18, IL22, IL23, IL25, IL7, IL33, IL35, ITGB4, ITK, KIR, LAG3, LAMP1, leptin, LPFS2, MHC class II, MUC-1, MUC-16, NCR3LG1, NKG2D, NKp46, NTPDase-1, OX40, OX40L, PD-1, PD-L1, PD-L2, PROM1, S152, SIRPalpha, SISP1, SLC, SPG64, ST2, STEAP1, STEAP2, Syk kinase, STEAP1, TROP2, TACI, TDO, TGFBETA, T14, TIGIT, TIM3, TLR, TLR2, TLR4, TLR5, TLR9, TMEF1, TNFa, TNFRSF7, Tp55, TREM1, TSLP, TSLPR, TWEAK, VEGF, VISTA, Vstm3, or WUCAM; Fc is a region comprising an immunoglobulin heavy chain constant region 2 (CH2), an immunoglobulin heavy chain constant region 3 (CH3), and optionally, an immunoglobulin hinge; and L1, L2, L3, L4 and L5 are amino acid linkers. In some aspects, the first polypeptide has a structure represented by VL1-VL2-VH2-VH1 and the second polypeptide has a structure represented by Fc; VL1-VL2-VH2-VH1; VH1-VH2-VL2-VL1; VL1-L1-VL2-L2-VH2-L3-VH1; VH1-L1-VH2-L2-VL2-L3-VL1; VL1-VL2-VH2-VH1-Fc; VH1-VH2-VL2-VL1-Fc; VL1-L1-VL2-L2-VH2-L3-VH1-Fc; VH1-L1-VH2-L2-VL2-L3-VL1-Fc; VIA-L1-VL2-L2-VH2-L3-VH1-L4-Fc; VH1-L1-VH2-L2-VL2-L3-VL1-L4-Fc; VL1-VL2-VH2-VH1-CH1; VH1-VH2-VL2-VL1-CH1; VL1-VL2-VH2-VH1-CL; VH1-VH2-VL2-VL1-CL; VL1-VL2-VH2-VH1-CH1-CL; VH1-VH2-VL2-VL1-CH1-CL; VL1-VL2-VH2-VH1-CL-CH1; VH1-VH2-VL2-VL1-CL-CH1; VL1-L1-VL2-L2-VH2-L3-VH1-L4-CH1; VH1-L1-VH2-L2-VL2-L3-VL1-L4-CH1; VL1-L1-VL2-L2-VH2-L3-VH1-L4-CL; VH1-L1-VH2-L2-VL2-L3-VL1-L4-CL; VL1-L1-VL2-L2-VH2-L3-VH1-L4-CH1-L5-CL; VH1-L1-VH2-L2-VL2- L3-VL1-L4-CH1-L5-CL; VL1-L1-VL2-L2-VH2-L3-VH1-L4-CL-L5-CH1; VH1-L1-VH2-L2-VL2-L3-VL1-L4-CL-L5-CH1; VL1-VL2-VH2-VH1-CH1-Fc; VH1-VH2-VL2-VL1-CH1-Fc; VL1-VL2-VH2-VH1-CL-Fc; VH1-VH2-VL2-VL1-CL-Fc; VL1-VL2-VH2-VH1-CH1-CL-Fc; VH1-VH2-VL2-VL1-CH1-CL-Fc; VL1-VL2-VH2-VH1-CL-CH1-Fc; VH1-VH2-VL2-VL1-CL-CH1-Fc; VL1-L1-VL2-L2-VH2-L3-VH1-L4-CH1-Fc; VH1-L1-VH2-L2-VL2-L3-VL1-L4-CH1-Fc; VL1-L1-VL2-L2-VH2-L3-VH1-L4-CL-Fc; VH1-L1-VH2-L2-VL2-L3-VL1-L4-CL-Fc; VL1-L1-VL2-L2-VH2-L3-VH1-L4-CH1-L5-CL-Fc; VH1-L1-VH2-L2-VL2-L3-VL1-L4-CH1-L5-CL-Fc; VL1-L1-VL2-L2-VH2-L3-VH1-L4-CL-L5-CH1-Fc; or VH1-L1-VH2-L2-VL2-L3-VL1-L4-CL-L5-CH1-Fc. In some aspects, the first polypeptide has a structure represented by VH1-VH2-VL2-VL1 and the second polypeptide has a structure represented by Fc; VL1-VL2-VH2-VH1; VH1-VH2-VL2-VL1; VL1-L1-VL2-L2-VH2-L3-VH1; VH1-L1-VH2-L2-VL2-L3-VL1; VL1-VL2-VH2-VH1-Fc; VH1-VH2-VL2-VL1-Fc; VL1-L1-VL2-L2-VH2-L3-VH1-Fc; VH1-L1-VH2-L2-VL2-L3-VL1-Fc; VL1-L1-VL2-L2-VH2-L3-VH1-L4-Fc; VH1-L1-VH2-L2-VL2-L3-VL1-L4-Fc; VL1-VL2-VH2-VH1-CH1; VH1-VH2-VL2-VL1-CH1; VL1-VL2-VH2-VH1-CL; VH1-VH2-VL2-VL1-CL; VL1-VL2-VH2-VH1-CH1-CL; VH1-VH2-VL2-VL1-CH1-CL; VL1-VL2-VH2-VH1-CL-CH1; VH1-VH2-VL2-VL1-CL-CH1; VL1-L1-VL2-L2-VH2-L3-VH1-L4-CH1; VH1-L1-VH2-L2-VL2-L3-VL1-L4-CH1; VL1-L1-VL2-L2-VH2-L3-VH1-L4-CL; VH1-L1-VH2-L2-VL2-L3-VL1-L4-CL; VL1-L1-VL2-L2-VH2-L3-VH1-L4-CH1-L5-CL; VH1-L1-VH2-L2-VL2-L3-VL1-L4-CH1-L5-CL; VL1-L1-VL2-L2-VH2-L3-VH1-L4-CL-L5-CH1; VH1-L1-VH2-L2-VL2-L3-VL1-L4-CL-L5-CH1; VL1-VL2-VH2-VH1-CH1-Fc; VH1-VH2-VL2-VL1-CH1-Fc; VL1-VL2-VH2-VH1-CL-Fc; VH1-VH2-VL2-VL1-CL-Fc; VL1-VL2-VH2-VH1-CH1-CL-Fc; VH1-VH2-VL2-VL1-CH1-CL-Fc; VL1-VL2-VH2-VH1-CL-CH1-Fc; VH1-VH2-VL2-VL1-CL-CH1-Fc; VL1-L1-VL2-L2-VH2-L3-VH1-L4-CH1-Fc; VH1-L1-VH2-L2-VL2-L3-VL1-L4-CH1-Fc; VL1-L1-VL2-L2-VH2-L3- VH1-L4-CL-Fc; VH1-L1-VH2-L2-VL2-L3-VL1-L4-CL-Fc; VL1-L1-VL2-L2-VH2-L3-VH1-L4-CH1-L5-CL-Fc; VH1-L1-VH2-L2-VL2-L3-VL1-L4-CH1-L5-CL-Fc; VL1-L1-VL2-L2-VH2-L3-VH1-L4-CL-L5-CH1-Fc; or VH1-L1-VH2-L2-VL2-L3-VL1-L4-CL-L5-CH1-Fc. In some aspects, the first polypeptide has a structure represented by VL1-L1-VL2-L2-VH2-L3-VH1 and the second polypeptide has a structure represented by Fc; VL1-VL2-VH2-VH1; VH1-VH2-VL2-VL1; VL1-L1-VL2-L2-VH2-L3-VH1; VH1-L1-VH2-L2-VL2-L3-VL1; VL1-VL2-VH2-VH1-Fc; VH1-VH2-VL2-VL1-Fc; VL1-L1-VL2-L2-VH2-L3-VH1-Fc; VH1-L1-VH2-L2-VL2-L3-VL1-Fc; VL1-L1-VL2-L2-VH2-L3-VH1-L4-Fc; VH1-L1-VH2-L2-VL2-L3-VL1-L4-Fc; VL1-VL2-VH2-VH1-CH1; VH1-VH2-VL2-VL1-CH1; VL1-VL2-VH2-VH1-CL; VH1-VH2-VL2-VL1-CL; VL1-VL2-VH2-VH1-CH1-CL; VH1-VH2-VL2-VL1-CH1-CL; VL1-VL2-VH2-VH1-CL-CH1; VH1-VH2-VL2-VL1-CL-CH1; VL1-L1-VL2-L2-VH2-L3-VH1-L4-CH1; VH1-L1-VH2-L2-VL2-L3-VL1-L4-CH1; VL1-L1-VL2-L2-VH2-L3-VH1-L4-CL; VH1-L1-VH2-L2-VL2-L3-VL1-L4-CL; VL1-L1-VL2-L2- VH2-L3-VH1-L4-CH1-L5-CL; VH1-L1-VH2-L2-VL2-L3-VL1-L4-CH1-L5-CL; VL1-L1-VL2-L2-VH2-L3-VH1-L4- CL-L5-CH1; VH1-L1-VH2-L2-VL2-L3-VL1-L4-CL-L5-CH1; VL1-VL2-VH2-VH1-CH1-Fc; VH1-VH2-VL2-VL1-CH1-Fc; VL1-VL2-VH2-VH1-CL-Fc; VH1-VH2-VL2-VL1-CL-Fc; VL1-VL2-VH2-VH1-CH1-CL-Fc; VH1-VH2-VL2-VL1-CH1-CL-Fc; VL1-VL2-VH2-VH1-CL-CH1-Fc; VH1-VH2-VL2-VL1-CL-CH1-Fc; VL1-L1-VL2-L2-VH2-L3-VH1-L4-CH1-Fc; VH1-L1-VH2-L2-VL2-L3-VL1-L4-CH1-Fc; VL1-L1-VL2-L2-VH2-L3-VH1-L4-CL-Fc; VH1-L1-VH2-L2-VL2-L3-VL1-L4-CL-Fc; VL1-L1-VL2-L2-VH2-L3-VH1-L4-CH1-L5-CL-Fc; VH1-L1-VH2-L2-VL2-L3-VL1-L4-CH1-L5-CL-Fc; VL1-L1-VL2-L2-VH2-L3-VH1-L4-CL-L5-CH1-Fc; or VH1-L1-VH2-L2-VL2-L3-VL1-L4-CL-L5-CH1-Fc. In some aspects, the first polypeptide has a structure represented by VH1-L1-VH2-L2-VL2-L3-VL1 and the second polypeptide has a structure represented by Fc; VL1-VL2-VH2-VH1; VH1-VH2-VL2-VL1; VL1-L1-VL2-L2-VH2-L3-VH1; VH1-L1-VH2-L2-VL2-L3-VL1; VL1-VL2-VH2-VH1-Fc; VH1-VH2-VL2-VL1-Fc; VL1-L1-VL2-L2-VH2-L3-VH1-Fc; VH1-L1-VH2-L2-VL2-L3-VL1-Fc; VL1-L1-VL2-L2-VH2-L3-VH1-L4-Fc; VH1-L1-VH2-L2-VL2-L3-VL1-L4-Fc; VL1-VL2-VH2-VH1-CH1; VH1-VH2-VL2-VL1-CH1; VL1-VL2-VH2-VH1-CL; VH1-VH2-VL2-VL1-CL; VL1-VL2-VH2-VH1-CH1-CL; VH1-VH2-VL2-VL1-CH1-CL; VL1-VL2-VH2-VH1-CL-CH1; VH1-VH2-VL2-VL1-CL-CH1; VL1-L1-VL2-L2-VH2-L3-VH1-L4-CH1; VH1-L1-VH2-L2-VL2-L3-VL1-L4-CH1; VL1-L1- VL2-L2-VH2-L3-VH1-L4-CL; VH1-L1-VH2-L2-VL2-L3-VL1-L4-CL; VL1-L1-VL2-L2-VH2-L3-VH1-L4-CH1-L5- CL; VH1-L1-VH2-L2-VL2-L3-VL1-L4-CH1-L5-CL; VL1-L1-VL2-L2-VH2-L3-VH1-L4-CL-L5-CH1; VH1-L1-VH2- L2-VL2-L3-VL1-L4-CL-L5-CH1; VL1-VL2-VH2-VH1-CH1-Fc; VH1-VH2-VL2-VL1-CH1-Fc; VL1-VL2-VH2-VH1-CL-Fc; VH1-VH2-VL2-VL1-CL-Fc; VL1-VL2-VH2-VH1-CH1-CL-Fc; VH1-VH2-VL2-VL1-CH1-CL-Fc; VL1-VL2-VH2-VH1-CL-CH1-Fc; VH1-VH2-VL2-VL1-CL-CH1-Fc; VL1-L1-VL2-L2-VH2-L3-VH1-L4-CH1-Fc; VH1-L1-VH2-L2-VL2-L3-VL1-L4-CH1-Fc; VL1-L1-VL2-L2-VH2-L3-VH1-L4-CL-Fc; VH1-L1-VH2-L2-VL2-L3-VL1-L4-CL-Fc; VL1-L1-VL2-L2-VH2-L3-VH1-L4-CH1-L5-CL-Fc; VH1-L1-VH2-L2-VL2-L3-VL1-L4-CH1-L5-CL-Fc; VL1-L1-VL2-L2-VH2-L3-VH1-L4-CL-L5-CH1-Fc; or VH1-L1-VH2-L2-VL2-L3-VL1-L4-CL-L5-CH1-Fc. In some aspects, the first polypeptide has a structure represented by VL1-VL2-VH2-VH1-Fc and the second polypeptide has a structure represented by Fc; VL1-VL2-VH2-VH1; VH1-VH2-VL2-VL1; VL1-L1-VL2-L2-VH2-L3-VH1; VH1-L1-VH2-L2-VL2-L3-VL1; VL1-VL2-VH2-VH1-Fc; VH1-VH2-VL2-VL1-Fc; VL1-L1-VL2-L2-VH2-L3-VH1-Fc; VH1-L1-VH2-L2-VL2-L3-VL1-Fc; VL1-L1-VL2-L2-VH2-L3-VH1-L4-Fc; VH1-L1-VH2-L2-VL2-L3-VL1-L4-Fc; VL1-VL2-VH2-VH1-CH1; VH1-VH2-VL2-VL1-CH1; VL1-VL2-VH2-VH1-CL; VH1-VH2-VL2-VL1-CL; VL1-VL2-VH2-VH1-CH1-CL; VH1-VH2-VL2-VL1-CH1-CL; VL1-VL2-VH2-VH1-CL-CH1; VH1-VH2-VL2-VL1-CL-CH1; VL1-L1-VL2-L2-VH2-L3-VH1-L4-CH1; VH1-L1-VH2-L2-VL2-L3-VL1-L4-CH1; VL1-L1-VL2-L2-VH2-L3-VH1-L4-CL; VH1- L1-VH2-L2-VL2-L3-VL1-L4-CL; VL1-L1-VL2-L2-VH2-L3-VH1-L4-CH1-L5-CL; VH1-L1-VH2-L2-VL2-L3-VL1- L4-CH1-L5-CL; VL1-L1-VL2-L2-VH2-L3-VH1-L4-CL-L5-CH1; VH1-L1-VH2-L2-VL2-L3-VL1-L4-CL-L5-CH1; VL1-VL2-VH2-VH1-CH1-Fc; VH1-VH2-VL2-VL1-CH1-Fc; VL1-VL2-VH2-VH1-CL-Fc; VH1-VH2-VL2-VL1-CL-Fc; VL1-VL2-VH2-VH1-CH1-CL-Fc; VH1-VH2-VL2-VL1-CH1-CL-Fc; VL1-VL2-VH2-VH1-CL-CH1-Fc; VH1-VH2-VL2-VL1-CL-CH1-Fc; VL1-L1-VL2-L2-VH2-L3-VH1-L4-CH1-Fc; VH1-L1-VH2-L2-VL2-L3-VL1-L4-CH1-Fc; VL1-L1-VL2-L2-VH2-L3-VH1-L4-CL-Fc; VH1-L1-VH2-L2-VL2-L3-VL1-L4-CL-Fc; VL1-L1-VL2-L2-VH2-L3-VH1-L4-CH1-L5-CL-Fc; VH1-L1-VH2-L2-VL2-L3-VL1-L4-CH1-L5-CL-Fc; VL1-L1-VL2-L2-VH2-L3-VH1-L4-CL- L5-CH1-Fc; or VH1-L1-VH2-L2-VL2-L3-VL1-L4-CL-L5-CH1-Fc. In some aspects, the first polypeptide has a structure represented by VH1-VH2-VL2-VL1-Fc and the second polypeptide has a structure represented by Fc; VL1-VL2-VH2-VH1; VH1-VH2-VL2-VL1; VL1-L1-VL2-L2-VH2-L3-VH1; VH1-L1-VH2-L2-VL2-L3-VL1; VL1-VL2-VH2-VH1-Fc; VH1-VH2-VL2-VL1-Fc; VL1-L1-VL2-L2-VH2-L3-VH1-Fc; VH1-L1-VH2-L2-VL2-L3-VL1-Fc; VL1-L1-VL2-L2-VH2-L3-VH1-L4-Fc; VH1-L1-VH2-L2-VL2-L3-VL1-L4-Fc; VL1-VL2-VH2-VH1-CH1; VH1-VH2-VL2-VL1-CH1; VL1-VL2-VH2-VH1-CL; VH1-VH2-VL2-VL1-CL; VL1-VL2-VH2-VH1-CH1-CL; VH1-VH2-VL2-VL1-CH1-CL; VL1-VL2-VH2-VH1-CL-CH1; VH1-VH2-VL2-VL1-CL-CH1; VL1-L1-VL2-L2-VH2-L3-VH1-L4-CH1; VH1-L1-VH2-L2-VL2-L3-VL1-L4-CH1; VL1-L1-VL2-L2-VH2-L3-VH1-L4-CL; VH1-L1-VH2-L2-VL2-L3-VL1-L4-CL; VL1-L1-VL2-L2-VH2-L3-VH1-L4-CH1-L5-CL; VH1-L1-VH2-L2-VL2-L3-VL1-L4-CH1-L5-CL; VL1-L1-VL2-L2-VH2-L3-VH1-L4-CL-L5-CH1; VH1-L1-VH2-L2-VL2-L3-VL1-L4-CL-L5-CH1; VL1-VL2-VH2-VH1-CH1-Fc; VH1-VH2-VL2-VL1-CH1-Fc; VL1-VL2-VH2-VH1-CL-Fc; VH1-VH2-VL2-VL1-CL-Fc; VL1-VL2-VH2-VH1-CH1-CL-Fc; VH1-VH2-VL2-VL1-CH1-CL-Fc; VL1-VL2-VH2-VH1-CL-CH1-Fc; VH1-VH2-VL2-VL1-CL-CH1-Fc; VL1-L1-VL2-L2-VH2-L3-VH1-L4-CH1-Fc; VH1-L1-VH2-L2-VL2-L3-VL1-L4-CH1-Fc; VL1-L1-VL2-L2-VH2-L3- VH1-L4-CL-Fc; VH1-L1-VH2-L2-VL2-L3-VL1-L4-CL-Fc; VL1-L1-VL2-L2-VH2-L3-VH1-L4-CH1-L5-CL-Fc; VH1-L1-VH2-L2-VL2-L3-VL1-L4-CH1-L5-CL-Fc; VL1-L1-VL2-L2-VH2-L3-VH1-L4-CL-L5-CH1-Fc; or VH1-L1-VH2-L2-VL2-L3-VL1-L4-CL-L5-CH1-Fc. In some aspects, the first polypeptide has a structure represented by VL1-L1-VL2-L2-VH2-L3-VH1-Fc and the second polypeptide has a structure represented by Fc; VL1-VL2-VH2-VH1; VH1-VH2-VL2-VL1; VL1-L1-VL2-L2-VH2-L3-VH1; VH1-L1-VH2-L2-VL2-L3-VL1; VL1-VL2-VH2-VH1-Fc; VH1-VH2-VL2-VL1-Fc; VL1-L1-VL2-L2-VH2-L3-VH1-Fc; VH1-L1-VH2-L2-VL2-L3-VL1-Fc; VL1-L1-VL2-L2-VH2-L3-VH1-L4-Fc; VH1-L1-VH2-L2-VL2-L3-VL1-L4-Fc; VL1-VL2-VH2-VH1-CH1; VH1-VH2-VL2-VL1-CH1; VL1-VL2-VH2-VH1-CL; VH1-VH2-VL2-VL1-CL; VL1-VL2-VH2-VH1-CH1-CL; VH1-VH2-VL2-VL1-CH1-CL; VL1-VL2-VH2-VH1-CL-CH1; VH1-VH2-VL2-VL1-CL-CH1; VL1-L1-VL2-L2-VH2-L3-VH1-L4-CH1; VH1-L1-VH2-L2-VL2-L3-VL1-L4-CH1; VL1-L1-VL2-L2-VH2-L3-VH1-L4-CL; VH1-L1-VH2-L2-VL2-L3-VL1-L4-CL; VL1-L1-VL2-L2- VH2-L3-VH1-L4-CH1-L5-CL; VH1-L1-VH2-L2-VL2-L3-VL1-L4-CH1-L5-CL; VL1-L1-VL2-L2-VH2-L3-VH1-L4- CL-L5-CH1; VH1-L1-VH2-L2-VL2-L3-VL1-L4-CL-L5-CH1; VL1-VL2-VH2-VH1-CH1-Fc; VH1-VH2-VL2-VL1-CH1-Fc; VL1-VL2-VH2-VH1-CL-Fc; VH1-VH2-VL2-VL1-CL-Fc; VL1-VL2-VH2-VH1-CH1-CL-Fc; VH1-VH2-VL2-VL1-CH1-CL-Fc; VL1-VL2-VH2-VH1-CL-CH1-Fc; VH1-VH2-VL2-VL1-CL-CH1-Fc; VL1-L1-VL2-L2-VH2-L3-VH1-L4-CH1-Fc; VH1-L1-VH2-L2-VL2-L3-VL1-L4-CH1-Fc; VL1-L1-VL2-L2-VH2-L3-VH1-L4-CL-Fc; VH1-L1-VH2-L2-VL2-L3-VL1-L4-CL-Fc; VL1-L1-VL2-L2-VH2-L3-VH1-L4-CH1-L5-CL-Fc; VH1-L1-VH2-L2-VL2-L3-VL1-L4-CH1-L5-CL-Fc; VL1-L1-VL2-L2-VH2-L3-VH1-L4-CL-L5-CH1-Fc; or VH1-L1-VH2-L2-VL2-L3-VL1-L4-CL-L5-CH1-Fc. In some aspects, the first polypeptide has a structure represented by VH1-L1-VH2-L2-VL2-L3-VL1-Fc and the second polypeptide has a structure represented by Fc; VL1-VL2-VH2-VH1; VH1-VH2-VL2-VL1; VL1-L1-VL2-L2-VH2-L3-VH1; VH1-L1-VH2-L2-VL2-L3-VL1; VL1-VL2-VH2-VH1-Fc; VH1-VH2-VL2-VL1-Fc; VL1-L1-VL2-L2-VH2-L3-VH1-Fc; VH1-L1-VH2-L2-VL2-L3-VL1-Fc; VL1-L1-VL2-L2-VH2-L3-VH1-L4-Fc; VH1-L1-VH2-L2-VL2-L3-VL1-L4-Fc; VL1-VL2-VH2-VH1-CH1; VH1-VH2-VL2-VL1-CH1; VL1-VL2-VH2-VH1-CL; VH1-VH2-VL2-VL1-CL; VL1-VL2-VH2-VH1-CH1-CL; VH1-VH2-VL2-VL1-CH1-CL; VL1-VL2-VH2-VH1-CL-CH1; VH1-VH2-VL2-VL1-CL-CH1; VL1-L1-VL2-L2-VH2-L3-VH1-L4-CH1; VH1-L1-VH2-L2-VL2-L3-VL1-L4-CH1; VL1-L1- VL2-L2-VH2-L3-VH1-L4-CL; VH1-L1-VH2-L2-VL2-L3-VL1-L4-CL; VL1-L1-VL2-L2-VH2-L3-VH1-L4-CH1-L5- CL; VH1-L1-VH2-L2-VL2-L3-VL1-L4-CH1-L5-CL; VL1-L1-VL2-L2-VH2-L3-VH1-L4-CL-L5-CH1; VH1-L1-VH2- L2-VL2-L3-VL1-L4-CL-L5-CH1; VL1-VL2-VH2-VH1-CH1-Fc; VH1-VH2-VL2-VL1-CH1-Fc; VL1-VL2-VH2-VH1-CL-Fc; VH1-VH2-VL2-VL1-CL-Fc; VL1-VL2-VH2-VH1-CH1-CL-Fc; VH1-VH2-VL2-VL1-CH1-CL-Fc; VL1-VL2-VH2-VH1-CL-CH1-Fc; VH1-VH2-VL2-VL1-CL-CH1-Fc; VL1-L1-VL2-L2-VH2-L3-VH1-L4-CH1-Fc; VH1-L1-VH2-L2-VL2-L3-VL1-L4-CH1-Fc; VL1-L1-VL2-L2-VH2-L3-VH1-L4-CL-Fc; VH1-L1-VH2-L2-VL2-L3-VL1-L4-CL-Fc; VL1-L1-VL2-L2-VH2-L3-VH1-L4-CH1-L5-CL-Fc; VH1-L1-VH2-L2-VL2-L3-VL1-L4-CH1-L5-CL-Fc; VL1-L1-VL2-L2-VH2-L3-VH1-L4-CL-L5-CH1-Fc; or VH1-L1-VH2-L2-VL2-L3-VL1-L4-CL-L5-CH1-Fc. In some aspects, the first polypeptide has a structure represented by VL1-L1-VL2-L2-VH2-L3-VH1-L4-Fc and the second polypeptide has a structure represented by Fc; VL1-VL2-VH2-VH1; VH1-VH2-VL2-VL1; VL1-L1-VL2-L2-VH2-L3-VH1; VH1-L1-VH2-L2-VL2-L3-VL1; VL1-VL2-VH2-VH1-Fc; VH1-VH2-VL2-VL1-Fc; VL1-L1-VL2-L2-VH2-L3-VH1-Fc; VH1-L1-VH2-L2-VL2-L3-VL1-Fc; VL1-L1-VL2-L2-VH2-L3-VH1-L4-Fc; VH1-L1-VH2-L2-VL2-L3-VL1-L4-Fc; VL1-VL2-VH2-VH1-CH1; VH1-VH2-VL2-VL1-CH1; VL1-VL2-VH2-VH1-CL; VH1-VH2-VL2-VL1-CL; VL1-VL2-VH2-VH1-CH1-CL; VH1-VH2-VL2-VL1-CH1-CL; VL1-VL2-VH2-VH1-CL-CH1; VH1-VH2-VL2-VL1-CL-CH1; VL1-L1-VL2-L2-VH2-L3-VH1-L4-CH1; VH1-L1-VH2-L2-VL2-L3-VL1-L4-CH1; VL1-L1-VL2-L2-VH2-L3-VH1-L4-CL; VH1-L1-VH2-L2-VL2-L3-VL1-L4-CL; VL1-L1-VL2-L2-VH2-L3-VH1-L4-CH1-L5-CL; VH1-L1-VH2-L2-VL2- L3-VL1-L4-CH1-L5-CL; VL1-L1-VL2-L2-VH2-L3-VH1-L4-CL-L5-CH1; VH1-L1-VH2-L2-VL2-L3-VL1-L4-CL-L5-CH1; VL1-VL2-VH2-VH1-CH1-Fc; VH1-VH2-VL2-VL1-CH1-Fc; VL1-VL2-VH2-VH1-CL-Fc; VH1-VH2-VL2-VL1-CL-Fc; VL1-VL2-VH2-VH1-CH1-CL-Fc; VH1-VH2-VL2-VL1-CH1-CL-Fc; VL1-VL2-VH2-VH1-CL-CH1-Fc; VH1-VH2-VL2-VL1-CL-CH1-Fc; VL1-L1-VL2-L2-VH2-L3-VH1-L4-CH1-Fc; VH1-L1-VH2-L2-VL2-L3-VL1-L4-CH1-Fc; VL1-L1-VL2-L2-VH2-L3-VH1-L4-CL-Fc; VH1-L1-VH2-L2-VL2-L3-VL1-L4-CL-Fc; VL1-L1-VL2-L2-VH2-L3-VH1-L4-CH1-L5-CL-Fc; VH1-L1-VH2-L2-VL2-L3-VL1-L4-CH1-L5-CL-Fc; VL1-L1-VL2-L2-VH2-L3-VH1-L4-CL-L5-CH1-Fc; or VH1-L1-VH2-L2-VL2-L3-VL1-L4-CL-L5-CH1-Fc. In some aspects, the first polypeptide has a structure represented by VH1-L1-VH2-L2-VL2-L3-VL1-L4-Fc and the second polypeptide has a structure represented by Fc; VL1-VL2-VH2-VH1; VH1-VH2-VL2-VL1; VL1-L1-VL2-L2-VH2-L3-VH1; VH1-L1-VH2-L2-VL2-L3-VL1; VL1-VL2-VH2-VH1-Fc; VH1-VH2-VL2-VL1-Fc; VL1-L1-VL2-L2-VH2-L3-VH1-Fc; VH1-L1-VH2-L2-VL2-L3-VL1-Fc; VL1-L1-VL2-L2-VH2-L3-VH1-L4-Fc; VH1-L1-VH2-L2-VL2-L3-VL1-L4-Fc; VL1-VL2-VH2-VH1-CH1; VH1-VH2-VL2-VL1-CH1; VL1-VL2-VH2-VH1-CL; VH1-VH2-VL2-VL1-CL; VL1-VL2-VH2-VH1-CH1-CL; VH1-VH2-VL2-VL1-CH1-CL; VL1-VL2-VH2-VH1-CL-CH1; VH1-VH2-VL2-VL1-CL-CH1; VL1-L1-VL2-L2-VH2-L3-VH1-L4-CH1; VH1-L1-VH2-L2-VL2-L3-VL1-L4-CH1; VL1-L1-VL2-L2-VH2-L3-VH1-L4-CL; VH1- L1-VH2-L2-VL2-L3-VL1-L4-CL; VL1-L1-VL2-L2-VH2-L3-VH1-L4-CH1-L5-CL; VH1-L1-VH2-L2-VL2-L3-VL1- L4-CH1-L5-CL; VL1-L1-VL2-L2-VH2-L3-VH1-L4-CL-L5-CH1; VH1-L1-VH2-L2-VL2-L3-VL1-L4-CL-L5-CH1; VL1-VL2-VH2-VH1-CH1-Fc; VH1-VH2-VL2-VL1-CH1-Fc; VL1-VL2-VH2-VH1-CL-Fc; VH1-VH2-VL2-VL1-CL-Fc; VL1-VL2-VH2-VH1-CH1-CL-Fc; VH1-VH2-VL2-VL1-CH1-CL-Fc; VL1-VL2-VH2-VH1-CL-CH1-Fc; VH1-VH2-VL2-VL1-CL-CH1-Fc; VL1-L1-VL2-L2-VH2-L3-VH1-L4-CH1-Fc; VH1-L1-VH2-L2-VL2-L3-VL1-L4-CH1-Fc; VL1-L1-VL2-L2-VH2-L3-VH1-L4-CL-Fc; VH1-L1-VH2-L2-VL2-L3-VL1-L4-CL-Fc; VL1-L1-VL2-L2-VH2-L3-VH1-L4-CH1-L5-CL-Fc; VH1-L1-VH2-L2-VL2-L3-VL1-L4-CH1-L5-CL-Fc; VL1-L1-VL2-L2-VH2-L3-VH1-L4-CL- L5-CH1-Fc; or VH1-L1-VH2-L2-VL2-L3-VL1-L4-CL-L5-CH1-Fc. In some aspects, the first polypeptide has a structure represented by VL1-VL2-VH2-VH1-CH1 and the second polypeptide has a structure represented by Fc; VL1-VL2-VH2-VH1; VH1-VH2-VL2-VL1; VL1-L1-VL2-L2-VH2-L3-VH1; VH1-L1-VH2-L2-VL2-L3-VL1; VL1-VL2-VH2-VH1-Fc; VH1-VH2-VL2-VL1-Fc; VL1-L1-VL2-L2-VH2-L3-VH1-Fc; VH1-L1-VH2-L2-VL2-L3-VL1-Fc; VL1-L1-VL2-L2-VH2-L3-VH1-L4-Fc; VH1-L1-VH2-L2-VL2-L3-VL1-L4-Fc; VL1-VL2-VH2-VH1-CH1; VH1-VH2-VL2-VL1-CH1; VL1-VL2-VH2-VH1-CL; VH1-VH2-VL2-VL1-CL; VL1-VL2-VH2-VH1-CH1-CL; VH1-VH2-VL2-VL1-CH1-CL; VL1-VL2-VH2-VH1-CL-CH1; VH1-VH2-VL2-VL1-CL-CH1; VL1-L1-VL2-L2-VH2-L3-VH1-L4-CH1; VH1-L1-VH2-L2-VL2-L3-VL1-L4-CH1; VL1-L1-VL2-L2-VH2-L3-VH1-L4-CL; VH1-L1-VH2-L2-VL2-L3-VL1-L4-CL; VL1-L1-VL2-L2-VH2-L3-VH1-L4-CH1-L5-CL; VH1-L1-VH2-L2-VL2-L3-VL1-L4-CH1-L5-CL; VL1-L1-VL2-L2-VH2-L3-VH1-L4-CL-L5-CH1; VH1-L1-VH2-L2-VL2-L3-VL1-L4-CL-L5-CH1; VL1-VL2-VH2-VH1-CH1-Fc; VH1-VH2-VL2-VL1-CH1-Fc; VL1-VL2-VH2-VH1-CL-Fc; VH1-VH2-VL2-VL1-CL-Fc; VL1-VL2-VH2-VH1-CH1-CL-Fc; VH1-VH2-VL2-VL1-CH1-CL-Fc; VL1-VL2-VH2-VH1-CL-CH1-Fc; VH1-VH2-VL2-VL1-CL-CH1-Fc; VL1-L1-VL2-L2-VH2-L3-VH1-L4-CH1-Fc; VH1-L1-VH2-L2-VL2-L3-VL1-L4-CH1-Fc; VL1-L1-VL2-L2-VH2-L3- VH1-L4-CL-Fc; VH1-L1-VH2-L2-VL2-L3-VL1-L4-CL-Fc; VL1-L1-VL2-L2-VH2-L3-VH1-L4-CH1-L5-CL-Fc; VH1-L1-VH2-L2-VL2-L3-VL1-L4-CH1-L5-CL-Fc; VL1-L1-VL2-L2-VH2-L3-VH1-L4-CL-L5-CH1-Fc; or VH1-L1-VH2-L2-VL2-L3-VL1-L4-CL-L5-CH1-Fc. In some aspects, the first polypeptide has a structure represented by VH1-VH2-VL2-VL1-CH1 and the second polypeptide has a structure represented by Fc; VL1-VL2-VH2-VH1; VH1-VH2-VL2-VL1; VL1-L1-VL2-L2-VH2-L3-VH1; VH1-L1-VH2-L2-VL2-L3-VL1; VL1-VL2-VH2-VH1-Fc; VH1-VH2-VL2-VL1-Fc; VL1-L1-VL2-L2-VH2-L3-VH1-Fc; VH1-L1-VH2-L2-VL2-L3-VL1-Fc; VL1-L1-VL2-L2-VH2-L3-VH1-L4-Fc; VH1-L1-VH2-L2-VL2-L3-VL1-L4-Fc; VL1-VL2-VH2-VH1-CH1; VH1-VH2-VL2-VL1-CH1; VL1-VL2-VH2-VH1-CL; VH1-VH2-VL2-VL1-CL; VL1-VL2-VH2-VH1-CH1-CL; VH1-VH2-VL2-VL1-CH1-CL; VL1-VL2-VH2-VH1-CL-CH1; VH1-VH2-VL2-VL1-CL-CH1; VL1-L1-VL2-L2-VH2-L3-VH1-L4-CH1; VH1-L1-VH2-L2-VL2-L3-VL1-L4-CH1; VL1-L1-VL2-L2-VH2-L3-VH1-L4-CL; VH1-L1-VH2-L2-VL2-L3-VL1-L4-CL; VL1-L1-VL2-L2-VH2-L3- VH1-L4-CH1-L5-CL; VH1-L1-VH2-L2-VL2-L3-VL1-L4-CH1-L5-CL; VL1-L1-VL2-L2-VH2-L3-VH1-L4-CL-L5-CH1; VH1-L1-VH2-L2-VL2-L3-VL1-L4-CL-L5-CH1; VL1-VL2-VH2-VH1-CH1-Fc; VH1-VH2-VL2-VL1-CH1-Fc; VL1-VL2-VH2-VH1-CL-Fc; VH1-VH2-VL2-VL1-CL-Fc; VL1-VL2-VH2-VH1-CH1-CL-Fc; VH1-VH2-VL2-VL1-CH1-CL-Fc; VL1-VL2-VH2-VH1-CL-CH1-Fc; VH1-VH2-VL2-VL1-CL-CH1-Fc; VL1-L1-VL2-L2-VH2-L3-VH1-L4-CH1-Fc; VH1-L1-VH2-L2-VL2-L3-VL1-L4-CH1-Fc; VL1-L1-VL2-L2-VH2-L3-VH1-L4-CL-Fc; VH1-L1-VH2-L2-VL2-L3-VL1-L4-CL-Fc; VL1-L1-VL2-L2-VH2-L3-VH1-L4-CH1-L5-CL-Fc; VH1-L1-VH2-L2-VL2-L3-VL1-L4-CH1-L5-CL-Fc; VL1-L1-VL2-L2-VH2-L3-VH1-L4-CL-L5-CH1-Fc; or VH1-L1-VH2-L2-VL2-L3-VL1-L4-CL-L5-CH1-Fc. In some aspects, the first polypeptide has a structure represented by VL1-VL2-VH2-VH1-CL and the second polypeptide has a structure represented by Fc; VL1-VL2-VH2-VH1; VH1-VH2-VL2-VL1; VL1-L1-VL2-L2-VH2-L3-VH1; VH1-L1-VH2-L2-VL2-L3-VL1; VL1-VL2-VH2-VH1-Fc; VH1-VH2-VL2-VL1-Fc; VL1-L1-VL2-L2-VH2-L3-VH1-Fc; VH1-L1-VH2-L2-VL2-L3-VL1-Fc; VL1-L1-VL2-L2-VH2-L3-VH1-L4-Fc; VH1-L1-VH2-L2-VL2-L3-VL1-L4- Fc; VL1-VL2-VH2-VH1-CH1; VH1-VH2-VL2-VL1-CH1; VL1-VL2-VH2-VH1-CL; VH1-VH2-VL2-VL1-CL; VL1-VL2-VH2-VH1-CH1-CL; VH1-VH2-VL2-VL1-CH1-CL; VL1-VL2-VH2-VH1-CL-CH1; VH1-VH2-VL2-VL1-CL-CH1; VL1-L1-VL2-L2-VH2-L3-VH1-L4-CH1; VH1-L1-VH2-L2-VL2-L3-VL1-L4-CH1; VL1-L1-VL2-L2-VH2-L3-VH1-L4-CL; VH1-L1-VH2-L2-VL2-L3-VL1-L4-CL; VL1-L1-VL2-L2-VH2-L3-VH1-L4-CH1-L5-CL; VH1-L1-VH2-L2-VL2-L3-VL1-L4-CH1-L5-CL; VL1-L1-VL2-L2-VH2-L3-VH1-L4-CL-L5-CH1; VH1-L1-VH2-L2-VL2-L3-VL1- L4-CL-L5-CH1; VL1-VL2-VH2-VH1-CH1-Fc; VH1-VH2-VL2-VL1-CH1-Fc; VL1-VL2-VH2-VH1-CL-Fc; VH1-VH2-VL2-VL1-CL-Fc; VL1-VL2-VH2-VH1-CH1-CL-Fc; VH1-VH2-VL2-VL1-CH1-CL-Fc; VL1-VL2-VH2-VH1-CL-CH1-Fc; VH1-VH2-VL2-VL1-CL-CH1-Fc; VL1-L1-VL2-L2-VH2-L3-VH1-L4-CH1-Fc; VH1-L1-VH2-L2-VL2-L3-VL1-L4-CH1-Fc; VL1-L1-VL2-L2-VH2-L3-VH1-L4-CL-Fc; VH1-L1-VH2-L2-VL2-L3-VL1-L4-CL-Fc; VL1-L1-VL2-L2-VH2-L3-VH1-L4-CH1-L5-CL-Fc; VH1-L1-VH2-L2-VL2-L3-VL1-L4-CH1-L5-CL-Fc; VL1-L1-VL2-L2-VH2-L3-VH1-L4-CL-L5-CH1-Fc; or VH1-L1-VH2-L2-VL2-L3-VL1-L4-CL-L5-CH1-Fc. In some aspects, the first polypeptide has a structure represented by VH1-VH2-VL2-VL1-CL and the second polypeptide has a structure represented by Fc; VL1-VL2-VH2-VH1; VH1-VH2-VL2-VL1; VL1-L1-VL2-L2-VH2-L3-VH1; VH1-L1-VH2-L2-VL2-L3-VL1; VL1-VL2-VH2-VH1-Fe; VH1-VH2-VL2-VL1-Fc; VL1-L1-VL2-L2-VH2-L3-VH1-Fc; VH1-L1-VH2-L2-VL2-L3-VL1-Fc; VL1-L1-VL2-L2-VH2-L3-VH1-L4-Fc; VH1-L1-VH2-L2-VL2-L3-VL1-L4-Fc; VL1-VL2-VH2-VH1-CH1; VH1-VH2-VL2-VL1-CH1; VL1-VL2-VH2-VH1-CL; VH1-VH2-VL2-VL1-CL; VL1-VL2-VH2-VH1-CH1-CL; VH1-VH2-VL2-VL1-CH1-CL; VL1-VL2-VH2-VH1-CL-CH1; VH1-VH2-VL2-VL1-CL-CH1; VL1-L1-VL2-L2-VH2-L3-VH1-L4-CH1; VH1-L1-VH2-L2-VL2-L3-VL1-L4-CH1; VL1-L1-VL2-L2-VH2-L3-VH1-L4-CL; VH1- L1-VH2-L2-VL2-L3-VL1-L4-CL; VL1-L1-VL2-L2-VH2-L3-VH1-L4-CH1-L5-CL; VH1-L1-VH2-L2-VL2-L3-VL1- L4-CH1-L5-CL; VL1-L1-VL2-L2-VH2-L3-VH1-L4-CL-L5-CH1; VH1-L1-VH2-L2-VL2-L3-VL1-L4-CL-L5-CH1; VL1-VL2-VH2-VH1-CH1-Fc; VH1-VH2-VL2-VL1-CH1-Fc; VL1-VL2-VH2-VH1-CL-Fc; VH1-VH2-VL2-VL1-CL-Fc; VL1-VL2-VH2-VH1-CH1-CL-Fc; VH1-VH2-VL2-VL1-CH1-CL-Fc; VL1-VL2-VH2-VH1-CL-CH1-Fc; VH1-VH2-VL2-VL1-CL-CH1-Fc; VL1-L1-VL2-L2-VH2-L3-VH1-L4-CH1-Fc; VH1-L1-VH2-L2-VL2-L3-VL1-L4-CH1-Fc; VL1-L1-VL2-L2-VH2-L3-VH1-L4-CL-Fc; VH1-L1-VH2-L2-VL2-L3-VL1-L4-CL-Fc; VL1-L1-VL2-L2-VH2-L3-VH1-L4-CH1-L5-CL-Fc; VH1-L1-VH2-L2-VL2-L3-VL1-L4-CH1-L5-CL-Fc; VL1-L1-VL2-L2-VH2-L3-VH1-L4-CL- L5-CH1-Fc; or VH1-L1-VH2-L2-VL2-L3-VL1-L4-CL-L5-CH1-Fc. In some aspects, the first polypeptide has a structure represented by VL1-VL2-VH2-VH1-CH1-CL and the second polypeptide has a structure represented by Fc; VL1-VL2-VH2-VH1; VH1-VH2-VL2-VL1; VL1-L1-VL2-L2-VH2-L3-VH1; VH1-L1-VH2-L2-VL2-L3-VL1; VL1-VL2-VH2-VH1-Fc; VH1-VH2-VL2-VL1-Fc; VL1-L1-VL2-L2-VH2-L3-VH1-Fc; VH1-L1-VH2-L2-VL2-L3-VL1-Fc; VL1-L1-VL2-L2-VH2-L3-VH1-L4-Fc; VH1-L1-VH2-L2-VL2-L3-VL1-L4-Fc; VL1-VL2-VH2-VH1-CH1; VH1-VH2-VL2-VL1-CH1; VL1-VL2-VH2-VH1-CL; VH1-VH2-VL2-VL1-CL; VL1-VL2-VH2-VH1-CH1-CL; VH1-VH2-VL2-VL1-CH1-CL; VL1-VL2-VH2-VH1-CL-CH1; VH1-VH2-VL2-VL1-CL-CH1; VL1-L1-VL2-L2-VH2-L3-VH1-L4-CH1; VH1-L1-VH2-L2-VL2-L3-VL1-L4-CH1; VL1-L1-VL2-L2-VH2-L3-VH1-L4-CL; VH1-L1-VH2-L2-VL2- L3-VL1-L4-CL; VL1-L1-VL2-L2-VH2-L3-VH1-L4-CH1-L5-CL; VH1-L1-VH2-L2-VL2-L3-VL1-L4-CH1-L5-CL; VL1-L1-VL2-L2-VH2-L3-VH1-L4-CL-L5-CH1; VH1-L1-VH2-L2-VL2-L3-VL1-L4-CL-L5-CH1; VL1-VL2-VH2-VH1-CH1-Fc; VH1-VH2-VL2-VL1-CH1-Fc; VL1-VL2-VH2-VH1-CL-Fc; VH1-VH2-VL2-VL1-CL-Fc; VL1-VL2-VH2-VH1-CH1-CL-Fc; VH1-VH2-VL2-VL1-CH1-CL-Fc; VL1-VL2-VH2-VH1-CL-CH1-Fc; VH1-VH2-VL2-VL1-CL-CH1-Fc; VL1-L1-VL2-L2-VH2-L3-VH1-L4-CH1-Fc; VH1-L1-VH2-L2-VL2-L3-VL1-L4-CH1-Fc; VL1-L1-VL2-L2-VH2-L3-VH1-L4-CL-Fc; VH1-L1-VH2-L2-VL2-L3-VL1-L4-CL-Fc; VL1-L1-VL2-L2-VH2-L3-VH1-L4-CH1-L5-CL- Fc; VH1-L1-VH2-L2-VL2-L3-VL1-L4-CH1-L5-CL-Fc; VL1-L1-VL2-L2-VH2-L3-VH1-L4-CL-L5-CH1-Fc; or VH1-L1-VH2-L2-VL2-L3-VL1-L4-CL-L5-CH1-Fc. In some aspects, the first polypeptide has a structure represented by VH1-VH2-VL2-VL1-CH1-CL and the second polypeptide has a structure represented by Fc; VL1-VL2-VH2-VH1; VH1-VH2-VL2-VL1; VL1-L1-VL2-L2-VH2-L3-VH1; VH1-L1-VH2-L2-VL2-L3-VL1; VL1-VL2-VH2-VH1-Fc; VH1-VH2-VL2-VL1-Fc; VL1-L1-VL2-L2-VH2-L3-VH1-Fc; VH1-L1-VH2-L2-VL2-L3-VL1-Fc; VL1-L1-VL2-L2-VH2-L3-VH1-L4-Fc; VH1-L1-VH2-L2-VL2-L3-VL1-L4-Fc; VL1-VL2-VH2-VH1-CH1; VH1-VH2-VL2-VL1-CH1; VL1-VL2-VH2-VH1-CL; VH1-VH2-VL2-VL1-CL; VL1-VL2-VH2-VH1-CH1-CL; VH1-VH2-VL2-VL1-CH1-CL; VL1-VL2-VH2-VH1-CL-CH1; VH1-VH2-VL2-VL1-CL-CH1; VL1-L1-VL2-L2-VH2-L3-VH1-L4-CH1; VH1-L1-VH2-L2-VL2-L3-VL1-L4-CH1; VL1-L1-VL2-L2-VH2-L3-VH1-L4-CL; VH1-L1-VH2-L2-VL2-L3-VL1-L4-CL; VL1-L1-VL2-L2-VH2-L3-VH1-L4-CH1-L5-CL; VH1-L1-VH2-L2-VL2-L3-VL1-L4-CH1-L5-CL; VL1-L1-VL2-L2- VH2-L3-VH1-L4-CL-L5-CH1; VH1-L1-VH2-L2-VL2-L3-VL1-L4-CL-L5-CH1; VL1-VL2-VH2-VH1-CH1-Fc; VH1-VH2-VL2-VL1-CH1-Fc; VL1-VL2-VH2-VH1-CL-Fc; VH1-VH2-VL2-VL1-CL-Fc; VL1-VL2-VH2-VH1-CH1-CL-Fc; VH1-VH2-VL2-VL1-CH1-CL-Fc; VL1-VL2-VH2-VH1-CL-CH1-Fc; VH1-VH2-VL2-VL1-CL-CH1-Fc; VL1-L1-VL2-L2-VH2-L3-VH1-L4-CH1-Fc; VH1-L1-VH2-L2-VL2-L3-VL1-L4-CH1-Fc; VL1-L1-VL2-L2-VH2-L3-VH1-L4- CL-Fc; VH1-L1-VH2-L2-VL2-L3-VL1-L4-CL-Fc; VL1-L1-VL2-L2-VH2-L3-VH1-L4-CH1-L5-CL-Fc; VH1-L1-VH2-L2-VL2-L3-VL1-L4-CH1-L5-CL-Fc; VL1-L1-VL2-L2-VH2-L3-VH1-L4-CL-L5-CH1-Fc; or VH1-L1-VH2-L2-VL2-L3-VL1-L4-CL-L5-CH1-Fc. In some aspects, the first polypeptide has a structure represented by VL1-VL2-VH2-VH1-CL-CH1 and the second polypeptide has a structure represented by Fc; VL1-VL2-VH2-VH1; VH1-VH2-VL2-VL1; VL1-L1-VL2-L2-VH2-L3-VH1; VH1-L1-VH2-L2-VL2-L3-VL1; VL1-VL2-VH2-VH1-Fc; VH1-VH2-VL2-VL1-Fc; VL1-L1-VL2-L2-VH2-L3-VH1-Fc; VH1-L1-VH2-L2-VL2-L3-VL1-Fc; VL1-L1-VL2-L2-VH2-L3-VH1-L4-Fc; VH1-L1-VH2-L2-VL2-L3-VL1-L4-Fc; VL1-VL2-VH2-VH1-CH1; VH1-VH2-VL2-VL1-CH1; VL1-VL2-VH2-VH1-CL; VH1-VH2-VL2-VL1-CL; VL1-VL2-VH2-VH1-CH1-CL; VH1-VH2-VL2-VL1-CH1-CL; VL1-VL2-VH2-VH1-CL-CH1; VH1-VH2-VL2-VL1-CL-CH1; VL1-L1-VL2-L2-VH2-L3-VH1-L4-CH1; VH1-L1-VH2-L2-VL2-L3-VL1-L4-CH1; VL1-L1-VL2-L2-VH2-L3-VH1-L4-CL; VH1-L1-VH2-L2-VL2-L3-VL1-L4-CL; VL1-L1-VL2-L2-VH2-L3-VH1- L4-CH1-L5-CL; VH1-L1-VH2-L2-VL2-L3-VL1-L4-CH1-L5-CL; VL1-L1-VL2-L2-VH2-L3-VH1-L4-CL-L5-CH1; VH1-L1-VH2-L2-VL2-L3-VL1-L4-CL-L5-CH1; VL1-VL2-VH2-VH1-CH1-Fc; VH1-VH2-VL2-VL1-CH1-Fc; VL1-VL2-VH2-VH1-CL-Fc; VH1-VH2-VL2-VL1-CL-Fc; VL1-VL2-VH2-VH1-CH1-CL-Fc; VH1-VH2-VL2-VL1-CH1-CL-Fc; VL1-VL2-VH2-VH1-CL-CH1-Fc; VH1-VH2-VL2-VL1-CL-CH1-Fc; VL1-L1-VL2-L2-VH2-L3-VH1-L4-CH1-Fc; VH1-L1-VH2-L2-VL2-L3-VL1-L4-CH1-Fc; VL1-L1-VL2-L2-VH2-L3-VH1-L4-CL-Fc; VH1-L1-VH2-L2-VL2-L3-VL1-L4-CL-Fc; VL1-L1-VL2-L2-VH2-L3-VH1-L4-CH1-L5-CL-Fc; VH1-L1-VH2-L2-VL2-L3-VL1-L4-CH1-L5-CL- Fc; VL1-L1-VL2-L2-VH2-L3-VH1-L4-CL-L5-CH1-Fc; or VH1-L1-VH2-L2-VL2-L3-VL1-L4-CL-L5-CH1-Fc. In some aspects, the first polypeptide has a structure represented by VH1-VH2-VL2-VL1-CL-CH1 and the second polypeptide has a structure represented by Fc; VL1-VL2-VH2-VH1; VH1-VH2-VL2-VL1; VL1-L1-VL2-L2-VH2-L3-VH1; VH1-L1-VH2-L2-VL2-L3-VL1; VL1-VL2-VH2-VH1-Fc; VH1-VH2-VL2-VL1-Fc; VL1-L1-VL2-L2-VH2-L3-VH1-Fc; VH1-L1-VH2-L2-VL2-L3-VL1-Fc; VL1-L1-VL2-L2-VH2-L3-VH1-L4-Fc; VH1-L1-VH2-L2-VL2-L3-VL1-L4-Fc; VL1-VL2-VH2-VH1-CH1; VH1-VH2-VL2-VL1-CH1; VL1-VL2-VH2-VH1-CL; VH1-VH2-VL2-VL1-CL; VL1-VL2-VH2-VH1-CH1-CL; VH1-VH2-VL2-VL1-CH1-CL; VL1-VL2-VH2-VH1-CL-CH1; VH1-VH2-VL2-VL1-CL-CH1; VL1-L1-VL2-L2-VH2-L3-VH1-L4-CH1; VH1-L1-VH2-L2-VL2-L3-VL1-L4-CH1; VL1-L1-VL2-L2- VH2-L3-VH1-L4-CL; VH1-L1-VH2-L2-VL2-L3-VL1-L4-CL; VL1-L1-VL2-L2-VH2-L3-VH1-L4-CH1-L5-CL; VH1-L1-VH2-L2-VL2-L3-VL1-L4-CH1-L5-CL; VL1-L1-VL2-L2-VH2-L3-VH1-L4-CL-L5-CH1; VH1-L1-VH2-L2-VL2- L3-VL1-L4-CL-L5-CH1; VL1-VL2-VH2-VH1-CH1-Fc; VH1-VH2-VL2-VL1-CH1-Fc; VL1-VL2-VH2-VH1-CL-Fc; VH1-VH2-VL2-VL1-CL-Fc; VL1-VL2-VH2-VH1-CH1-CL-Fc; VH1-VH2-VL2-VL1-CH1-CL-Fc; VL1-VL2-VH2-VH1-CL-CH1-Fc; VH1-VH2-VL2-VL1-CL-CH1-Fc; VL1-L1-VL2-L2-VH2-L3-VH1-L4-CH1-Fc; VH1-L1-VH2-L2-VL2-L3-VL1-L4-CH1-Fc; VL1-L1-VL2-L2-VH2-L3-VH1-L4-CL-Fc; VH1-L1-VH2-L2-VL2-L3-VL1-L4-CL-Fc; VL1-L1-VL2-L2-VH2-L3-VH1-L4-CH1-L5-CL-Fc; VH1-L1-VH2-L2-VL2-L3-VL1-L4-CH1-L5-CL-Fc; VL1-L1-VL2-L2-VH2-L3-VH1-L4-CL-L5-CH1-Fc; or VH1-L1-VH2-L2-VL2-L3-VL1-L4-CL-L5-CH1-Fc. In some aspects, the first polypeptide has a structure represented by VL1-L1-VL2-L2-VH2-L3-VH1-L4-CH1 and the second polypeptide has a structure represented by Fc; VL1-VL2-VH2-VH1; VH1-VH2-VL2-VL1; VL1-L1-VL2-L2-VH2-L3-VH1; VH1-L1-VH2-L2-VL2-L3-VL1; VL1-VL2-VH2-VH1-Fc; VH1-VH2-VL2-VL1-Fc; VL1-L1-VL2-L2-VH2-L3-VH1-Fc; VH1-L1-VH2-L2-VL2-L3-VL1-Fc; VL1-L1-VL2-L2-VH2-L3-VH1-L4-Fc; VH1-L1-VH2-L2-VL2-L3-VL1-L4-Fc; VL1-VL2-VH2-VH1-CH1; VH1-VH2-VL2-VL1-CH1; VL1-VL2-VH2-VH1-CL; VH1-VH2-VL2-VL1-CL; VL1-VL2-VH2-VH1-CH1-CL; VH1-VH2-VL2-VL1-CH1-CL; VL1-VL2-VH2-VH1-CL-CH1; VH1-VH2-VL2-VL1-CL-CH1; VL1-L1-VL2-L2-VH2-L3-VH1-L4-CH1; VH1-L1-VH2-L2-VL2-L3-VL1-L4-CH1; VL1-L1-VL2-L2-VH2-L3-VH1-L4-CL; VH1-L1-VH2-L2-VL2-L3-VL1-L4-CL; VL1-L1-VL2-L2-VH2-L3-VH1-L4-CH1-L5-CL; VH1-L1-VH2-L2-VL2- L3-VL1-L4-CH1-L5-CL; VL1-L1-VL2-L2-VH2-L3-VH1-L4-CL-L5-CH1; VH1-L1-VH2-L2-VL2-L3-VL1-L4-CL-L5-CH1; VL1-VL2-VH2-VH1-CH1-Fc; VH1-VH2-VL2-VL1-CH1-Fc; VL1-VL2-VH2-VH1-CL-Fc; VH1-VH2-VL2-VL1-CL-Fc; VL1-VL2-VH2-VH1-CH1-CL-Fc; VH1-VH2-VL2-VL1-CH1-CL-Fc; VL1-VL2-VH2-VH1-CL-CH1-Fc; VH1-VH2-VL2-VL1-CL-CH1-Fc; VL1-L1-VL2-L2-VH2-L3-VH1-L4-CH1-Fc; VH1-L1-VH2-L2-VL2-L3-VL1-L4-CH1-Fc; VL1-L1-VL2-L2-VH2-L3-VH1-L4-CL-Fc; VH1-L1-VH2-L2-VL2-L3-VL1-L4-CL-Fc; VL1-L1-VL2-L2-VH2-L3-VH1-L4-CH1-L5-CL-Fc; VH1-L1-VH2-L2-VL2-L3-VL1-L4-CH1-L5-CL-Fc; VL1-L1-VL2-L2-VH2-L3-VH1-L4-CL-L5-CH1-Fc; or VH1-L1-VH2-L2-VL2-L3-VL1-L4-CL-L5-CH1-Fc. In some aspects, the first polypeptide has a structure represented by VH1-L1-VH2-L2-VL2-L3-VL1-L4-CH1 and the second polypeptide has a structure represented by Fc; VL1-VL2-VH2-VH1; VH1-VH2-VL2-VL1; VL1-L1-VL2-L2-VH2-L3-VH1; VH1-L1-VH2-L2-VL2-L3-VL1; VL1-VL2-VH2-VH1-Fc; VH1-VH2-VL2-VL1-Fc; VL1-L1-VL2-L2-VH2-L3-VH1-Fc; VH1-L1-VH2-L2-VL2-L3-VL1-Fc; VL1-L1-VL2-L2-VH2-L3-VH1-L4-Fc; VH1-L1-VH2-L2-VL2-L3-VL1-L4-Fc; VL1-VL2-VH2-VH1-CH1; VH1-VH2-VL2-VL1-CH1; VL1-VL2-VH2-VH1-CL; VH1-VH2-VL2-VL1-CL; VL1-VL2-VH2-VH1-CH1-CL; VH1-VH2-VL2-VL1-CH1-CL; VL1-VL2-VH2-VH1-CL-CH1; VH1-VH2-VL2-VL1-CL-CH1; VL1-L1-VL2-L2-VH2-L3-VH1-L4-CH1; VH1-L1-VH2-L2-VL2-L3-VL1-L4-CH1; VL1-L1-VL2-L2-VH2-L3-VH1-L4-CL; VH1- L1-VH2-L2-VL2-L3-VL1-L4-CL; VL1-L1-VL2-L2-VH2-L3-VH1-L4-CH1-L5-CL; VH1-L1-VH2-L2-VL2-L3-VL1- L4-CH1-L5-CL; VL1-L1-VL2-L2-VH2-L3-VH1-L4-CL-L5-CH1; VH1-L1-VH2-L2-VL2-L3-VL1-L4-CL-L5-CH1; VL1-VL2-VH2-VH1-CH1-Fc; VH1-VH2-VL2-VL1-CH1-Fc; VL1-VL2-VH2-VH1-CL-Fc; VH1-VH2-VL2-VL1-CL-Fc; VL1-VL2-VH2-VH1-CH1-CL-Fc; VH1-VH2-VL2-VL1-CH1-CL-Fc; VL1-VL2-VH2-VH1-CL-CH1-Fc; VH1-VH2-VL2-VL1-CL-CH1-Fc; VL1-L1-VL2-L2-VH2-L3-VH1-L4-CH1-Fc; VH1-L1-VH2-L2-VL2-L3-VL1-L4-CH1-Fc; VL1-L1-VL2-L2-VH2-L3-VH1-L4-CL-Fc; VH1-L1-VH2-L2-VL2-L3-VL1-L4-CL-Fc; VL1-L1-VL2-L2-VH2-L3-VH1-L4-CH1-L5-CL-Fc; VH1-L1-VH2-L2-VL2-L3-VL1-L4-CH1-L5-CL-Fc; VL1-L1-VL2-L2-VH2-L3-VH1-L4-CL- L5-CH1-Fc; or VH1-L1-VH2-L2-VL2-L3-VL1-L4-CL-L5-CH1-Fc. In some aspects, the first polypeptide has a structure represented by VL1-L1-VL2-L2-VH2-L3-VH1-L4-CL and the second polypeptide has a structure represented by Fc; VL1-VL2-VH2-VH1; VH1-VH2-VL2-VL1; VL1-L1-VL2-L2-VH2-L3-VH1; VH1-L1-VH2-L2-VL2-L3-VL1; VL1-VL2-VH2-VH1-Fc; VH1-VH2-VL2-VL1-Fc; VL1-L1-VL2-L2-VH2-L3-VH1-Fc; VH1-L1-VH2-L2-VL2-L3-VL1-Fc; VL1-L1-VL2-L2-VH2-L3-VH1-L4-Fc; VH1-L1-VH2-L2-VL2-L3-VL1-L4-Fc; VL1-VL2-VH2-VH1-CH1; VH1-VH2-VL2-VL1-CH1; VL1-VL2-VH2-VH1-CL; VH1-VH2-VL2-VL1-CL; VL1-VL2-VH2-VH1-CH1-CL; VH1-VH2-VL2-VL1-CH1-CL; VL1-VL2-VH2-VH1-CL-CH1; VH1-VH2-VL2-VL1-CL-CH1; VL1-L1-VL2-L2-VH2-L3-VH1-L4-CH1; VH1-L1-VH2-L2-VL2-L3-VL1-L4-CH1; VL1-L1-VL2-L2-VH2-L3-VH1-L4-CL; VH1-L1-VH2- L2-VL2-L3-VL1-L4-CL; VL1-L1-VL2-L2-VH2-L3-VH1-L4-CH1-L5-CL; VH1-L1-VH2-L2-VL2-L3-VL1-L4-CH1- L5-CL; VL1-L1-VL2-L2-VH2-L3-VH1-L4-CL-L5-CH1; VH1-L1-VH2-L2-VL2-L3-VL1-L4-CL-L5-CH1; VL1-VL2-VH2-VH1-CH1-Fc; VH1-VH2-VL2-VL1-CH1-Fc; VL1-VL2-VH2-VH1-CL-Fc; VH1-VH2-VL2-VL1-CL-Fc; VL1-VL2-VH2-VH1-CH1-CL-Fc; VH1-VH2-VL2-VL1-CH1-CL-Fc; VL1-VL2-VH2-VH1-CL-CH1-Fc; VH1-VH2-VL2-VL1-CL-CH1-Fc; VL1-L1-VL2-L2-VH2-L3-VH1-L4-CH1-Fc; VH1-L1-VH2-L2-VL2-L3-VL1-L4-CH1-Fc; VL1-L1-VL2-L2-VH2-L3-VH1-L4-CL-Fc; VH1-L1-VH2-L2-VL2-L3-VL1-L4-CL-Fc; VL1-L1-VL2-L2-VH2-L3-VH1-L4-CH1-L5-CL-Fc; VH1-L1-VH2-L2-VL2-L3-VL1-L4-CH1-L5-CL-Fc; VL1-L1-VL2-L2-VH2-L3-VH1-L4-CL-L5-CH1-Fc; or VH1-L1-VH2-L2-VL2-L3-VL1-L4-CL-L5-CH1-Fc. In some aspects, the first polypeptide has a structure represented by VH1-L1-VH2-L2-VL2-L3-VL1-L4-CL and the second polypeptide has a structure represented by Fc; VL1-VL2-VH2-VH1; VH1-VH2-VL2-VL1; VL1-L1-VL2-L2-VH2-L3-VH1; VH1-L1-VH2-L2-VL2-L3-VL1; VL1-VL2-VH2-VH1-Fc; VH1-VH2-VL2-VL1-Fc; VL1-L1-VL2-L2-VH2-L3-VH1-Fc; VH1-L1-VH2-L2-VL2-L3-VL1-Fc; VL1-L1-VL2-L2-VH2-L3-VH1-L4-Fc; VH1-L1-VH2-L2-VL2-L3-VL1-L4-Fc; VL1-VL2-VH2-VH1-CH1; VH1-VH2-VL2-VL1-CH1; VL1-VL2-VH2-VH1-CL; VH1-VH2-VL2-VL1-CL; VL1-VL2-VH2-VH1-CH1-CL; VH1-VH2-VL2-VL1-CH1-CL; VL1-VL2-VH2-VH1-CL-CH1; VH1-VH2-VL2-VL1-CL-CH1; VL1-L1-VL2-L2-VH2-L3-VH1-L4-CH1; VH1-L1-VH2-L2-VL2-L3-VL1-L4-CH1; VL1-L1-VL2-L2-VH2-L3-VH1-L4-CL; VH1-L1-VH2-L2-VL2- L3-VL1-L4-CL; VL1-L1-VL2-L2-VH2-L3-VH1-L4-CH1-L5-CL; VH1-L1-VH2-L2-VL2-L3-VL1-L4-CH1-L5-CL; VL1-L1-VL2-L2-VH2-L3-VH1-L4-CL-L5-CH1; VH1-L1-VH2-L2-VL2-L3-VL1-L4-CL-L5-CH1; VL1-VL2-VH2-VH1-CH1-Fc; VH1-VH2-VL2-VL1-CH1-Fc; VL1-VL2-VH2-VH1-CL-Fc; VH1-VH2-VL2-VL1-CL-Fc; VL1-VL2-VH2-VH1-CH1-CL-Fc; VH1-VH2-VL2-VL1-CH1-CL-Fc; VL1-VL2-VH2-VH1-CL-CH1-Fc; VH1-VH2-VL2-VL1-CL-CH1-Fc; VL1-L1-VL2-L2-VH2-L3-VH1-L4-CH1-Fc; VH1-L1-VH2-L2-VL2-L3-VL1-L4-CH1-Fc; VL1-L1-VL2-L2-VH2-L3-VH1-L4-CL-Fc; VH1-L1-VH2-L2-VL2-L3-VL1-L4-CL-Fc; VL1-L1-VL2-L2-VH2-L3-VH1-L4-CH1-L5-CL- Fc; VH1-L1-VH2-L2-VL2-L3-VL1-L4-CH1-L5-CL-Fc; VL1-L1-VL2-L2-VH2-L3-VH1-L4-CL-L5-CH1-Fc; or VH1-L1-VH2-L2-VL2-L3-VL1-L4-CL-L5-CH1-Fc. In some aspects, the first polypeptide has a structure represented by VL1-L1-VL2-L2-VH2-L3-VH1-L4-CH1-L5-CL and the second polypeptide has a structure represented by Fc; VL1-VL2-VH2-VH1; VH1-VH2-VL2-VL1; VL1-L1-VL2-L2-VH2-L3-VH1; VH1-L1-VH2-L2-VL2-L3-VL1; VL1-VL2-VH2-VH1-Fc; VH1-VH2-VL2-VL1-Fc; VL1-L1-VL2-L2-VH2-L3-VH1-Fc; VH1-L1-VH2-L2-VL2-L3-VL1-Fc; VL1-L1-VL2-L2-VH2-L3-VH1-L4-Fc; VH1-L1-VH2-L2-VL2-L3-VL1-L4-Fc; VL1-VL2-VH2-VH1-CH1; VH1-VH2-VL2-VL1-CH1; VL1-VL2-VH2-VH1-CL; VH1-VH2-VL2-VL1-CL; VL1-VL2-VH2-VH1-CH1-CL; VH1-VH2-VL2-VL1-CH1-CL; VL1-VL2-VH2-VH1-CL-CH1; VH1-VH2-VL2-VL1-CL-CH1; VL1-L1-VL2-L2-VH2-L3-VH1-L4-CH1; VH1-L1-VH2-L2-VL2-L3-VL1-L4-CH1; VL1-L1-VL2-L2-VH2-L3-VH1-L4-CL; VH1-L1-VH2-L2-VL2-L3-VL1-L4-CL; VL1-L1-VL2-L2-VH2-L3-VH1-L4-CH1-L5-CL; VH1-L1-VH2-L2-VL2-L3-VL1-L4-CH1-L5-CL; VL1-L1-VL2-L2-VH2-L3-VH1-L4-CL-L5-CH1; VH1-L1-VH2-L2-VL2-L3-VL1-L4-CL-L5-CH1; VL1-VL2-VH2-VH1-CH1-Fc; VH1-VH2-VL2-VL1-CH1-Fc; VL1-VL2-VH2-VH1-CL-Fc; VH1-VH2-VL2-VL1-CL-Fc; VL1-VL2-VH2-VH1-CH1-CL-Fc; VH1-VH2-VL2-VL1-CH1-CL-Fc; VL1-VL2-VH2-VH1-CL-CH1-Fc; VH1-VH2-VL2-VL1-CL-CH1-Fc; VL1-L1-VL2-L2-VH2-L3-VH1-L4-CH1-Fc; VH1-L1-VH2-L2-VL2-L3-VL1-L4-CH1-Fc; VL1-L1-VL2-L2-VH2-L3- VH1-L4-CL-Fc; VH1-L1-VH2-L2-VL2-L3-VL1-L4-CL-Fc; VL1-L1-VL2-L2-VH2-L3-VH1-L4-CH1-L5-CL-Fc; VH1-L1-VH2-L2-VL2-L3-VL1-L4-CH1-L5-CL-Fc; VL1-L1-VL2-L2-VH2-L3-VH1-L4-CL-L5-CH1-Fc; or VH1-L1-VH2-L2-VL2-L3-VL1-L4-CL-L5-CH1-Fc. In some aspects, the first polypeptide has a structure represented by VH1-L1-VH2-L2-VL2-L3-VL1-L4-CH1-L5-CL and the second polypeptide has a structure represented by Fc; VL1-VL2-VH2-VH1; VH1-VH2-VL2-VL1; VL1-L1-VL2-L2-VH2-L3-VH1; VH1-L1-VH2-L2-VL2-L3-VL1; VL1-VL2-VH2-VH1-Fc; VH1-VH2-VL2-VL1-Fc; VL1-L1-VL2-L2-VH2-L3-VH1-Fc; VH1-L1-VH2-L2-VL2-L3-VL1-Fc; VL1-L1-VL2-L2-VH2-L3-VH1-L4-Fc; VH1-L1-VH2-L2-VL2-L3-VL1-L4-Fc; VL1-VL2-VH2-VH1-CH1; VH1-VH2-VL2-VL1-CH1; VL1-VL2-VH2-VH1-CL; VH1-VH2-VL2-VL1-CL; VL1-VL2-VH2-VH1-CH1-CL; VH1-VH2-VL2-VL1-CH1-CL; VL1-VL2-VH2-VH1-CL-CH1; VH1-VH2-VL2-VL1-CL-CH1; VL1-L1-VL2-L2-VH2-L3-VH1-L4-CH1; VH1-L1-VH2-L2-VL2-L3-VL1-L4-CH1; VL1-L1-VL2-L2-VH2-L3-VH1-L4-CL; VH1-L1-VH2-L2-VL2-L3-VL1-L4-CL; VL1-L1-VL2-L2-VH2-L3-VH1-L4-CH1-L5-CL; VH1-L1-VH2-L2-VL2-L3-VL1-L4-CH1-L5-CL; VL1-L1-VL2-L2- VH2-L3-VH1-L4-CL-L5-CH1; VH1-L1-VH2-L2-VL2-L3-VL1-L4-CL-L5-CH1; VL1-VL2-VH2-VH1-CH1-Fc; VH1-VH2-VL2-VL1-CH1-Fc; VL1-VL2-VH2-VH1-CL-Fc; VH1-VH2-VL2-VL1-CL-Fc; VL1-VL2-VH2-VH1-CH1-CL-Fc; VH1-VH2-VL2-VL1-CH1-CL-Fc; VL1-VL2-VH2-VH1-CL-CH1-Fc; VH1-VH2-VL2-VL1-CL-CH1-Fc; VL1-L1-VL2-L2-VH2-L3-VH1-L4-CH1-Fc; VH1-L1-VH2-L2-VL2-L3-VL1-L4-CH1-Fc; VL1-L1-VL2-L2-VH2-L3-VH1-L4- CL-Fc; VH1-L1-VH2-L2-VL2-L3-VL1-L4-CL-Fc; VL1-L1-VL2-L2-VH2-L3-VH1-L4-CH1-L5-CL-Fc; VH1-L1-VH2-L2-VL2-L3-VL1-L4-CH1-L5-CL-Fc; VL1-L1-VL2-L2-VH2-L3-VH1-L4-CL-L5-CH1-Fc; or VH1-L1-VH2-L2-VL2-L3-VL1-L4-CL-L5-CH1-Fc. In some aspects, the first polypeptide has a structure represented by VL1-L1-VL2-L2-VH2-L3-VH1-L4-CL-L5-CH1 and the second polypeptide has a structure represented by Fc; VL1-VL2-VH2-VH1; VH1-VH2-VL2-VL1; VL1-L1-VL2-L2-VH2-L3-VH1; VH1-L1-VH2-L2-VL2-L3-VL1; VL1-VL2-VH2-VH1-Fc; VH1-VH2-VL2-VL1-Fc; VL1-L1-VL2-L2-VH2-L3-VH1-Fc; VH1-L1-VH2-L2-VL2-L3-VL1-Fc; VL1-L1-VL2-L2-VH2-L3-VH1-L4-Fc; VH1-L1-VH2-L2-VL2-L3-VL1-L4-Fc; VL1-VL2-VH2-VH1-CH1; VH1-VH2-VL2-VL1-CH1; VL1-VL2-VH2-VH1-CL; VH1-VH2-VL2-VL1-CL; VL1-VL2-VH2-VH1-CH1-CL; VH1-VH2-VL2-VL1-CH1-CL; VL1-VL2-VH2-VH1-CL-CH1; VH1-VH2-VL2-VL1-CL-CH1; VL1-L1-VL2-L2-VH2-L3-VH1-L4-CH1; VH1-L1-VH2-L2-VL2-L3-VL1-L4-CH1; VL1-L1-VL2-L2-VH2-L3-VH1-L4-CL; VH1-L1-VH2-L2-VL2-L3-VL1-L4-CL; VL1-L1-VL2-L2- VH2-L3-VH1-L4-CH1-L5-CL; VH1-L1-VH2-L2-VL2-L3-VL1-L4-CH1-L5-CL; VL1-L1-VL2-L2-VH2-L3-VH1-L4- CL-L5-CH1; VH1-L1-VH2-L2-VL2-L3-VL1-L4-CL-L5-CH1; VL1-VL2-VH2-VH1-CH1-Fc; VH1-VH2-VL2-VL1-CH1-Fc; VL1-VL2-VH2-VH1-CL-Fc; VH1-VH2-VL2-VL1-CL-Fc; VL1-VL2-VH2-VH1-CH1-CL-Fc; VH1-VH2-VL2-VL1-CH1-CL-Fc; VL1-VL2-VH2-VH1-CL-CH1-Fc; VH1-VH2-VL2-VL1-CL-CH1-Fc; VL1-L1-VL2-L2-VH2-L3-VH1-L4-CH1-Fc; VH1-L1-VH2-L2-VL2-L3-VL1-L4-CH1-Fc; VL1-L1-VL2-L2-VH2-L3-VH1-L4-CL-Fc; VH1-L1-VH2-L2-VL2-L3-VL1-L4-CL-Fc; VL1-L1-VL2-L2-VH2-L3-VH1-L4-CH1-L5-CL-Fc; VH1-L1-VH2-L2-VL2-L3-VL1-L4-CH1-L5-CL-Fc; VL1-L1-VL2-L2-VH2-L3-VH1-L4-CL-L5-CH1-Fc; or VH1-L1-VH2-L2-VL2-L3-VL1-L4-CL-L5-CH1-Fc. In some aspects, the first polypeptide has a structure represented by VH1-L1-VH2-L2-VL2-L3-VL1-L4-CL-L5-CH1 and the second polypeptide has a structure represented by Fc; VL1-VL2-VH2-VH1; VH1-VH2-VL2-VL1; VL1-L1-VL2-L2-VH2-L3-VH1; VH1-L1-VH2-L2-VL2-L3-VL1; VL1-VL2-VH2-VH1-Fc; VH1-VH2-VL2-VL1-Fc; VL1-L1-VL2-L2-VH2-L3-VH1-Fc; VH1-L1-VH2-L2-VL2-L3-VL1-Fc; VL1-L1-VL2-L2-VH2-L3-VH1-L4-Fc; VH1-L1-VH2-L2-VL2-L3-VL1-L4-Fc; VL1-VL2-VH2-VH1-CH1; VH1-VH2-VL2-VL1-CH1; VL1-VL2-VH2-VH1-CL; VH1-VH2-VL2-VL1-CL; VL1-VL2-VH2-VH1-CH1-CL; VH1-VH2-VL2-VL1-CH1-CL; VL1-VL2-VH2-VH1-CL-CH1; VH1-VH2-VL2-VL1-CL-CH1; VL1-L1-VL2-L2-VH2-L3-VH1-L4-CH1; VH1-L1-VH2-L2-VL2-L3-VL1-L4-CH1; VL1-L1-VL2-L2-VH2-L3-VH1-L4-CL; VH1-L1-VH2-L2-VL2-L3-VL1-L4-CL; VL1-L1-VL2-L2-VH2-L3- VH1-L4-CH1-L5-CL; VH1-L1-VH2-L2-VL2-L3-VL1-L4-CH1-L5-CL; VL1-L1-VL2-L2-VH2-L3-VH1-L4-CL-L5-CH1; VH1-L1-VH2-L2-VL2-L3-VL1-L4-CL-L5-CH1; VL1-VL2-VH2-VH1-CH1-Fc; VH1-VH2-VL2-VL1-CH1-Fc; VL1-VL2-VH2-VH1-CL-Fc; VH1-VH2-VL2-VL1-CL-Fc; VL1-VL2-VH2-VH1-CH1-CL-Fc; VH1-VH2-VL2-VL1-CH1-CL-Fc; VL1-VL2-VH2-VH1-CL-CH1-Fc; VH1-VH2-VL2-VL1-CL-CH1-Fc; VL1-L1-VL2-L2-VH2-L3-VH1-L4-CH1-Fc; VH1-L1-VH2-L2-VL2-L3-VL1-L4-CH1-Fc; VL1-L1-VL2-L2-VH2-L3-VH1-L4-CL-Fc; VH1-L1-VH2-L2-VL2-L3-VL1-L4-CL-Fc; VL1-L1-VL2-L2-VH2-L3-VH1-L4-CH1-L5-CL-Fc; VH1-L1-VH2-L2-VL2-L3-VL1-L4-CH1-L5-CL-Fc; VL1-L1-VL2-L2-VH2-L3-VH1-L4-CL-L5-CH1-Fc; or VH1-L1-VH2-L2-VL2-L3-VL1-L4-CL-L5-CH1-Fc. In some aspects, the first polypeptide has a structure represented by VL1-VL2-VH2-VH1-CH1-Fc and the second polypeptide has a structure represented by Fc; VL1-VL2-VH2-VH1; VH1-VH2-VL2-VL1; VL1-L1-VL2-L2-VH2-L3-VH1; VH1-L1-VH2-L2-VL2-L3-VL1; VL1-VL2-VH2-VH1-Fc; VH1-VH2-VL2-VL1-Fc; VL1-L1-VL2-L2-VH2-L3-VH1-Fc; VH1-L1-VH2-L2-VL2-L3-VL1-Fc; VL1-L1-VL2-L2-VH2-L3-VH1-L4-Fc; VH1-L1-VH2-L2-VL2-L3-VL1-L4-Fc; VL1-VL2-VH2-VH1-CH1; VH1-VH2-VL2-VL1-CH1; VL1-VL2-VH2-VH1-CL; VH1-VH2-VL2-VL1-CL; VL1-VL2-VH2-VH1-CH1-CL; VH1-VH2-VL2-VL1-CH1-CL; VL1-VL2-VH2-VH1-CL-CH1; VH1-VH2-VL2-VL1-CL-CH1; VL1-L1-VL2-L2-VH2-L3-VH1-L4-CH1; VH1-L1-VH2-L2-VL2-L3-VL1-L4-CH1; VL1-L1-VL2-L2- VH2-L3-VH1-L4-CL; VH1-L1-VH2-L2-VL2-L3-VL1-L4-CL; VL1-L1-VL2-L2-VH2-L3-VH1-L4-CH1-L5-CL; VH1-L1-VH2-L2-VL2-L3-VL1-L4-CH1-L5-CL; VL1-L1-VL2-L2-VH2-L3-VH1-L4-CL-L5-CH1; VH1-L1-VH2-L2-VL2- L3-VL1-L4-CL-L5-CH1; VL1-VL2-VH2-VH1-CH1-Fc; VH1-VH2-VL2-VL1-CH1-Fc; VL1-VL2-VH2-VH1-CL-Fc; VH1-VH2-VL2-VL1-CL-Fc; VL1-VL2-VH2-VH1-CH1-CL-Fc; VH1-VH2-VL2-VL1-CH1-CL-Fc; VL1-VL2-VH2-VH1-CL-CH1-Fc; VH1-VH2-VL2-VL1-CL-CH1-Fc; VL1-L1-VL2-L2-VH2-L3-VH1-L4-CH1-Fc; VH1-L1-VH2-L2-VL2-L3-VL1-L4-CH1-Fc; VL1-L1-VL2-L2-VH2-L3-VH1-L4-CL-Fc; VH1-L1-VH2-L2-VL2-L3-VL1-L4-CL-Fc; VL1-L1-VL2-L2-VH2-L3-VH1-L4-CH1-L5-CL-Fc; VH1-L1-VH2-L2-VL2-L3-VL1-L4-CH1-L5-CL-Fc; VL1-L1-VL2-L2-VH2-L3-VH1-L4-CL-L5-CH1-Fc; or VH1-L1-VH2-L2-VL2-L3-VL1-L4-CL-L5-CH1-Fc. In some aspects, the first polypeptide has a structure represented by VH1-VH2-VL2-VL1-CH1-Fc and the second polypeptide has a structure represented by Fc; VL1-VL2-VH2-VH1; VH1-VH2-VL2-VL1; VL1-L1-VL2-L2-VH2-L3-VH1; VH1-L1-VH2-L2-VL2-L3-VL1; VL1-VL2-VH2-VH1-Fe; VH1-VH2-VL2-VL1-Fc; VL1-L1-VL2-L2-VH2-L3-VH1-Fc; VH1-L1-VH2-L2-VL2-L3-VL1-Fc; VL1-L1-VL2-L2-VH2-L3-VH1-L4-Fc; VH1-L1-VH2-L2-VL2-L3-VL1-L4-Fc; VL1-VL2-VH2-VH1-CH1; VH1-VH2-VL2-VL1-CH1; VL1-VL2-VH2-VH1-CL; VH1-VH2-VL2-VL1-CL; VL1-VL2-VH2-VH1-CH1-CL; VH1-VH2-VL2-VL1-CH1-CL; VL1-VL2-VH2-VH1-CL-CH1; VH1-VH2-VL2-VL1-CL-CH1; VL1-L1-VL2-L2-VH2-L3-VH1-L4-CH1; VH1-L1-VH2-L2-VL2-L3-VL1-L4-CH1; VL1-L1-VL2-L2-VH2-L3-VH1-L4-CL; VH1- L1-VH2-L2-VL2-L3-VL1-L4-CL; VL1-L1-VL2-L2-VH2-L3-VH1-L4-CH1-L5-CL; VH1-L1-VH2-L2-VL2-L3-VL1- L4-CH1-L5-CL; VL1-L1-VL2-L2-VH2-L3-VH1-L4-CL-L5-CH1; VH1-L1-VH2-L2-VL2-L3-VL1-L4-CL-L5-CH1; VL1-VL2-VH2-VH1-CH1-Fc; VH1-VH2-VL2-VL1-CH1-Fc; VL1-VL2-VH2-VH1-CL-Fc; VH1-VH2-VL2-VL1-CL-Fc; VL1-VL2-VH2-VH1-CH1-CL-Fc; VH1-VH2-VL2-VL1-CH1-CL-Fc; VL1-VL2-VH2-VH1-CL-CH1-Fc; VH1-VH2-VL2-VL1-CL-CH1-Fc; VL1-L1-VL2-L2-VH2-L3-VH1-L4-CH1-Fc; VH1-L1-VH2-L2-VL2-L3-VL1-L4-CH1-Fc; VL1-L1-VL2-L2-VH2-L3-VH1-L4-CL-Fc; VH1-L1-VH2-L2-VL2-L3-VL1-L4-CL-Fc; VL1-L1-VL2-L2-VH2-L3-VH1-L4-CH1-L5-CL-Fc; VH1-L1-VH2-L2-VL2-L3-VL1-L4-CH1-L5-CL-Fc; VL1-L1-VL2-L2-VH2-L3-VH1-L4-CL- L5-CH1-Fc; or VH1-L1-VH2-L2-VL2-L3-VL1-L4-CL-L5-CH1-Fc. In some aspects, the first polypeptide has a structure represented by VL1-VL2-VH2-VH1-CL-Fc and the second polypeptide has a structure represented by Fc; VL1-VL2-VH2-VH1; VH1-VH2-VL2-VL1; VL1-L1-VL2-L2-VH2-L3-VH1; VH1-L1-VH2-L2-VL2-L3-VL1; VL1-VL2-VH2-VH1-Fc; VH1-VH2-VL2-VL1-Fc; VL1-L1-VL2-L2-VH2-L3-VH1-Fc; VH1-L1-VH2-L2-VL2-L3-VL1-Fc; VL1-L1-VL2-L2-VH2-L3-VH1-L4-Fc; VH1-L1-VH2-L2-VL2-L3-VL1-L4-Fc; VL1-VL2-VH2-VH1-CH1; VH1-VH2-VL2-VL1-CH1; VL1-VL2-VH2-VH1-CL; VH1-VH2-VL2-VL1-CL; VL1-VL2-VH2-VH1-CH1-CL; VH1-VH2-VL2-VL1-CH1-CL; VL1-VL2-VH2-VH1-CL-CH1; VH1-VH2-VL2-VL1-CL-CH1; VL1-L1-VL2-L2-VH2-L3-VH1-L4-CH1; VH1-L1-VH2-L2-VL2-L3-VL1-L4-CH1; VL1-L1-VL2-L2-VH2-L3-VH1-L4-CL; VH1-L1-VH2-L2-VL2-L3-VL1-L4-CL; VL1-L1-VL2-L2-VH2-L3-VH1-L4-CH1-L5-CL; VH1-L1-VH2-L2-VL2-L3-VL1-L4-CH1-L5-CL; VL1-L1-VL2-L2-VH2-L3-VH1-L4-CL-L5-CH1; VH1-L1-VH2-L2-VL2-L3-VL1-L4-CL-L5-CH1; VL1-VL2-VH2-VH1-CH1-Fc; VH1-VH2-VL2-VL1-CH1-Fc; VL1-VL2-VH2-VH1-CL-Fc; VH1-VH2-VL2-VL1-CL-Fc; VL1-VL2-VH2-VH1-CH1-CL-Fc; VH1-VH2-VL2-VL1-CH1-CL-Fc; VL1-VL2-VH2-VH1-CL-CH1-Fc; VH1-VH2-VL2-VL1-CL-CH1-Fc; VL1-L1-VL2-L2-VH2-L3-VH1-L4-CH1-Fc; VH1-L1-VH2-L2-VL2-L3-VL1-L4-CH1-Fc; VL1-L1-VL2-L2-VH2-L3- VH1-L4-CL-Fc; VH1-L1-VH2-L2-VL2-L3-VL1-L4-CL-Fc; VL1-L1-VL2-L2-VH2-L3-VH1-L4-CH1-L5-CL-Fc; VH1-L1-VH2-L2-VL2-L3-VL1-L4-CH1-L5-CL-Fc; VL1-L1-VL2-L2-VH2-L3-VH1-L4-CL-L5-CH1-Fc; or VH1-L1-VH2-L2-VL2-L3-VL1-L4-CL-L5-CH1-Fc. In some aspects, the first polypeptide has a structure represented by VH1-VH2-VL2-VL1-CL-Fc and the second polypeptide has a structure represented by Fc; VL1-VL2-VH2-VH1; VH1-VH2-VL2-VL1; VL1-L1-VL2-L2-VH2-L3-VH1; VH1-L1-VH2-L2-VL2-L3-VL1; VL1-VL2-VH2-VH1-Fc; VH1-VH2-VL2-VL1-Fc; VL1-L1-VL2-L2-VH2-L3-VH1-Fc; VH1-L1-VH2-L2-VL2-L3-VL1-Fc; VL1-L1-VL2-L2-VH2-L3-VH1-L4-Fc; VH1-L1-VH2-L2-VL2-L3-VL1-L4-Fc; VL1-VL2-VH2-VH1-CH1; VH1-VH2-VL2-VL1-CH1; VL1-VL2-VH2-VH1-CL; VH1-VH2-VL2-VL1-CL; VL1-VL2-VH2-VH1-CH1-CL; VH1-VH2-VL2-VL1-CH1-CL; VL1-VL2-VH2-VH1-CL-CH1; VH1-VH2-VL2-VL1-CL-CH1; VL1-L1-VL2-L2-VH2-L3-VH1-L4-CH1; VH1-L1-VH2-L2-VL2-L3-VL1-L4-CH1; VL1-L1-VL2-L2-VH2-L3-VH1-L4-CL; VH1-L1-VH2-L2-VL2-L3-VL1-L4-CL; VL1-L1-VL2-L2-VH2-L3- VH1-L4-CH1-L5-CL; VH1-L1-VH2-L2-VL2-L3-VL1-L4-CH1-L5-CL; VL1-L1-VL2-L2-VH2-L3-VH1-L4-CL-L5-CH1; VH1-L1-VH2-L2-VL2-L3-VL1-L4-CL-L5-CH1; VL1-VL2-VH2-VH1-CH1-Fc; VH1-VH2-VL2-VL1-CH1-Fc; VL1-VL2-VH2-VH1-CL-Fc; VH1-VH2-VL2-VL1-CL-Fc; VL1-VL2-VH2-VH1-CH1-CL-Fc; VH1-VH2-VL2-VL1-CH1-CL-Fc; VL1-VL2-VH2-VH1-CL-CH1-Fc; VH1-VH2-VL2-VL1-CL-CH1-Fc; VL1-L1-VL2-L2-VH2-L3-VH1-L4-CH1-Fc; VH1-L1-VH2-L2-VL2-L3-VL1-L4-CH1-Fc; VL1-L1-VL2-L2-VH2-L3-VH1-L4-CL-Fc; VH1-L1-VH2-L2-VL2-L3-VL1-L4-CL-Fc; VL1-L1-VL2-L2-VH2-L3-VH1-L4-CH1-L5-CL-Fc; VH1-L1-VH2-L2-VL2-L3-VL1-L4-CH1-L5-CL-Fc; VL1-L1-VL2-L2-VH2-L3-VH1-L4-CL-L5-CH1-Fc; or VH1-L1-VH2-L2-VL2-L3-VL1-L4-CL-L5-CH1-Fc. In some aspects, the first polypeptide has a structure represented by VL1-VL2-VH2-VH1-CH1-CL-Fc and the second polypeptide has a structure represented by Fc; VL1-VL2-VH2-VH1; VH1-VH2-VL2-VL1; VL1-L1-VL2-L2-VH2-L3-VH1; VH1-L1-VH2-L2-VL2-L3-VL1; VL1-VL2-VH2-VH1-Fc; VH1-VH2-VL2-VL1-Fc; VL1-L1-VL2-L2-VH2-L3-VH1-Fc; VH1-L1-VH2-L2-VL2-L3-VL1-Fc; VL1-L1-VL2-L2-VH2-L3-VH1-L4-Fc; VH1-L1-VH2-L2-VL2-L3-VL1-L4-Fc; VL1-VL2-VH2-VH1-CH1; VH1-VH2-VL2-VL1-CH1; VL1-VL2-VH2-VH1-CL; VH1-VH2-VL2-VL1-CL; VL1-VL2-VH2-VH1-CH1-CL; VH1-VH2-VL2-VL1-CH1-CL; VL1-VL2-VH2-VH1-CL-CH1; VH1-VH2-VL2-VL1-CL-CH1; VL1-L1-VL2-L2-VH2-L3-VH1-L4-CH1; VH1-L1-VH2-L2-VL2-L3-VL1-L4-CH1; VL1-L1-VL2-L2- VH2-L3-VH1-L4-CL; VH1-L1-VH2-L2-VL2-L3-VL1-L4-CL; VL1-L1-VL2-L2-VH2-L3-VH1-L4-CH1-L5-CL; VH1-L1-VH2-L2-VL2-L3-VL1-L4-CH1-L5-CL; VL1-L1-VL2-L2-VH2-L3-VH1-L4-CL-L5-CH1; VH1-L1-VH2-L2-VL2- L3-VL1-L4-CL-L5-CH1; VL1-VL2-VH2-VH1-CH1-Fc; VH1-VH2-VL2-VL1-CH1-Fc; VL1-VL2-VH2-VH1-CL-Fc; VH1-VH2-VL2-VL1-CL-Fc; VL1-VL2-VH2-VH1-CH1-CL-Fc; VH1-VH2-VL2-VL1-CH1-CL-Fc; VL1-VL2-VH2-VH1-CL-CH1-Fc; VH1-VH2-VL2-VL1-CL-CH1-Fc; VL1-L1-VL2-L2-VH2-L3-VH1-L4-CH1-Fc; VH1-L1-VH2-L2-VL2-L3-VL1-L4-CH1-Fc; VL1-L1-VL2-L2-VH2-L3-VH1-L4-CL-Fc; VH1-L1-VH2-L2-VL2-L3-VL1-L4-CL-Fc; VL1-L1-VL2-L2-VH2-L3-VH1-L4-CH1-L5-CL-Fc; VH1-L1-VH2-L2-VL2-L3-VL1-L4-CH1-L5-CL-Fc; VL1-L1-VL2-L2-VH2-L3-VH1-L4-CL-L5-CH1-Fc; or VH1-L1-VH2-L2-VL2-L3-VL1-L4-CL-L5-CH1-Fc. In some aspects, the first polypeptide has a structure represented by VH1-VH2-VL2-VL1-CH1-CL-Fc and the second polypeptide has a structure represented by Fc; VL1-VL2-VH2-VH1; VH1-VH2-VL2-VL1; VL1-L1-VL2-L2-VH2-L3-VH1; VH1-L1-VH2-L2-VL2-L3-VL1; VL1-VL2-VH2-VH1-Fc; VH1-VH2-VL2-VL1-Fc; VL1-L1-VL2-L2-VH2-L3-VH1-Fc; VH1-L1-VH2-L2-VL2-L3-VL1-Fc; VL1-L1-VL2-L2-VH2-L3-VH1-L4-Fc; VH1-L1-VH2-L2-VL2-L3-VL1-L4-Fc; VL1-VL2-VH2-VH1-CH1; VH1-VH2-VL2-VL1-CH1; VL1-VL2-VH2-VH1-CL; VH1-VH2-VL2-VL1-CL; VL1-VL2-VH2-VH1-CH1-CL; VH1-VH2-VL2-VL1-CH1-CL; VL1-VL2-VH2-VH1-CL-CH1; VH1-VH2-VL2-VL1-CL-CH1; VL1-L1-VL2-L2-VH2-L3-VH1-L4-CH1; VH1-L1-VH2-L2-VL2-L3-VL1-L4-CH1; VL1-L1-VL2-L2-VH2-L3-VH1-L4-CL; VH1-L1-VH2-L2-VL2-L3-VL1-L4-CL; VL1-L1-VL2-L2-VH2-L3-VH1-L4-CH1-L5-CL; VH1-L1-VH2-L2-VL2- L3-VL1-L4-CH1-L5-CL; VL1-L1-VL2-L2-VH2-L3-VH1-L4-CL-L5-CH1; VH1-L1-VH2-L2-VL2-L3-VL1-L4-CL-L5-CH1; VL1-VL2-VH2-VH1-CH1-Fc; VH1-VH2-VL2-VL1-CH1-Fc; VL1-VL2-VH2-VH1-CL-Fc; VH1-VH2-VL2-VL1-CL-Fc; VL1-VL2-VH2-VH1-CH1-CL-Fc; VH1-VH2-VL2-VL1-CH1-CL-Fc; VL1-VL2-VH2-VH1-CL-CH1-Fc; VH1-VH2-VL2-VL1-CL-CH1-Fc; VL1-L1-VL2-L2-VH2-L3-VH1-L4-CH1-Fc; VH1-L1-VH2-L2-VL2-L3-VL1-L4-CH1-Fc; VL1-L1-VL2-L2-VH2-L3-VH1-L4-CL-Fc; VH1-L1-VH2-L2-VL2-L3-VL1-L4-CL-Fc; VL1-L1-VL2-L2-VH2-L3-VH1-L4-CH1-L5-CL-Fc; VH1-L1-VH2-L2-VL2-L3-VL1-L4-CH1-L5-CL-Fc; VL1-L1-VL2-L2-VH2-L3-VH1-L4-CL-L5-CH1-Fc; or VH1-L1-VH2-L2-VL2-L3-VL1-L4-CL-L5-CH1-Fc. In some aspects, the first polypeptide has a structure represented by VL1-VL2-VH2-VH1-CL-CH1-Fc and the second polypeptide has a structure represented by Fc; VL1-VL2-VH2-VH1; VH1-VH2-VL2-VL1; VL1-L1-VL2-L2-VH2-L3-VH1; VH1-L1-VH2-L2-VL2-L3-VL1; VL1-VL2-VH2-VH1-Fc; VH1-VH2-VL2-VL1-Fc; VL1-L1-VL2-L2-VH2-L3-VH1-Fc; VH1-L1-VH2-L2-VL2-L3-VL1-Fc; VL1-L1-VL2-L2-VH2-L3-VH1-L4-Fc; VH1-L1-VH2-L2-VL2-L3-VL1-L4-Fc; VL1-VL2-VH2-VH1-CH1; VH1-VH2-VL2-VL1-CH1; VL1-VL2-VH2-VH1-CL; VH1-VH2-VL2-VL1-CL; VL1-VL2-VH2-VH1-CH1-CL; VH1-VH2-VL2-VL1-CH1-CL; VL1-VL2-VH2-VH1-CL-CH1; VH1-VH2-VL2-VL1-CL-CH1; VL1-L1-VL2-L2-VH2-L3-VH1-L4-CH1; VH1-L1-VH2-L2-VL2-L3-VL1-L4-CH1; VL1-L1-VL2-L2-VH2-L3-VH1-L4-CL; VH1-L1-VH2- L2-VL2-L3-VL1-L4-CL; VL1-L1-VL2-L2-VH2-L3-VH1-L4-CH1-L5-CL; VH1-L1-VH2-L2-VL2-L3-VL1-L4-CH1- L5-CL; VL1-L1-VL2-L2-VH2-L3-VH1-L4-CL-L5-CH1; VH1-L1-VH2-L2-VL2-L3-VL1-L4-CL-L5-CH1; VL1-VL2-VH2-VH1-CH1-Fc; VH1-VH2-VL2-VL1-CH1-Fc; VL1-VL2-VH2-VH1-CL-Fc; VH1-VH2-VL2-VL1-CL-Fc; VL1-VL2-VH2-VH1-CH1-CL-Fc; VH1-VH2-VL2-VL1-CH1-CL-Fc; VL1-VL2-VH2-VH1-CL-CH1-Fc; VH1-VH2-VL2-VL1-CL-CH1-Fc; VL1-L1-VL2-L2-VH2-L3-VH1-L4-CH1-Fc; VH1-L1-VH2-L2-VL2-L3-VL1-L4-CH1-Fc; VL1-L1-VL2-L2-VH2-L3-VH1-L4-CL-Fc; VH1-L1-VH2-L2-VL2-L3-VL1-L4-CL-Fc; VL1-L1-VL2-L2-VH2-L3-VH1-L4-CH1-L5-CL-Fc; VH1-L1-VH2-L2-VL2-L3-VL1-L4-CH1-L5-CL-Fc; VL1-L1-VL2-L2-VH2-L3-VH1-L4-CL-L5-CH1-Fc; or VH1-L1-VH2-L2-VL2-L3-VL1-L4-CL-L5-CH1-Fc. In some aspects, the first polypeptide has a structure represented by VH1-VH2-VL2-VL1-CL-CH1-Fc and the second polypeptide has a structure represented by Fc; VL1-VL2-VH2-VH1; VH1-VH2-VL2-VL1; VL1-L1-VL2-L2-VH2-L3-VH1; VH1-L1-VH2-L2-VL2-L3-VL1; VL1-VL2-VH2-VH1-Fc; VH1-VH2-VL2-VL1-Fc; VL1-L1-VL2-L2-VH2-L3-VH1-Fc; VH1-L1-VH2-L2-VL2-L3-VL1-Fc; VL1-L1-VL2-L2-VH2-L3-VH1-L4-Fc; VH1-L1-VH2-L2-VL2-L3-VL1-L4-Fc; VL1-VL2-VH2-VH1-CH1; VH1-VH2-VL2-VL1-CH1; VL1-VL2-VH2-VH1-CL; VH1-VH2-VL2-VL1-CL; VL1-VL2-VH2-VH1-CH1-CL; VH1-VH2-VL2-VL1-CH1-CL; VL1-VL2-VH2-VH1-CL-CH1; VH1-VH2-VL2-VL1-CL-CH1; VL1-L1-VL2-L2-VH2-L3-VH1-L4-CH1; VH1-L1-VH2-L2-VL2-L3-VL1-L4-CH1; VL1-L1-VL2-L2-VH2-L3-VH1-L4-CL; VH1-L1-VH2-L2-VL2-L3-VL1-L4-CL; VL1-L1-VL2-L2-VH2-L3-VH1-L4-CH1-L5-CL; VH1-L1-VH2-L2-VL2-L3-VL1-L4-CH1-L5-CL; VL1-L1-VL2-L2-VH2-L3-VH1-L4-CL-L5-CH1; VH1-L1-VH2-L2-VL2-L3-VL1-L4-CL-L5-CH1; VL1-VL2-VH2-VH1-CH1-Fc; VH1-VH2-VL2-VL1-CH1-Fc; VL1-VL2-VH2-VH1-CL-Fc; VH1-VH2-VL2-VL1-CL-Fc; VL1-VL2-VH2-VH1-CH1-CL-Fc; VH1-VH2-VL2-VL1-CH1-CL-Fc; VL1-VL2-VH2-VH1-CL-CH1-Fc; VH1-VH2-VL2-VL1-CL-CH1-Fc; VL1-L1-VL2-L2-VH2-L3-VH1-L4-CH1-Fc; VH1-L1-VH2-L2-VL2-L3-VL1-L4-CH1-Fc; VL1-L1-VL2-L2-VH2-L3- VH1-L4-CL-Fc; VH1-L1-VH2-L2-VL2-L3-VL1-L4-CL-Fc; VL1-L1-VL2-L2-VH2-L3-VH1-L4-CH1-L5-CL-Fc; VH1-L1-VH2-L2-VL2-L3-VL1-L4-CH1-L5-CL-Fc; VL1-L1-VL2-L2-VH2-L3-VH1-L4-CL-L5-CH1-Fc; or VH1-L1-VH2-L2-VL2-L3-VL1-L4-CL-L5-CH1-Fc. In some aspects, the first polypeptide has a structure represented by VL1-L1-VL2-L2-VH2-L3-VH1-L4-CH1-Fc and the second polypeptide has a structure represented by Fc; VL1-VL2-VH2-VH1; VH1-VH2-VL2-VL1; VL1-L1-VL2-L2-VH2-L3-VH1; VH1-L1-VH2-L2-VL2-L3-VL1; VL1-VL2-VH2-VH1-Fc; VH1-VH2-VL2-VL1-Fc; VL1-L1-VL2-L2-VH2-L3-VH1-Fc; VH1-L1-VH2-L2-VL2-L3-VL1-Fc; VL1-L1-VL2-L2-VH2-L3-VH1-L4-Fc; VH1-L1-VH2-L2-VL2-L3-VL1-L4-Fc; VL1-VL2-VH2-VH1-CH1; VH1-VH2-VL2-VL1-CH1; VL1-VL2-VH2-VH1-CL; VH1-VH2-VL2-VL1-CL; VL1-VL2-VH2-VH1-CH1-CL; VH1-VH2-VL2-VL1-CH1-CL; VL1-VL2-VH2-VH1-CL-CH1; VH1-VH2-VL2-VL1-CL-CH1; VL1-L1-VL2-L2-VH2-L3-VH1-L4-CH1; VH1-L1-VH2-L2-VL2-L3-VL1-L4-CH1; VL1-L1-VL2-L2-VH2-L3-VH1-L4-CL; VH1-L1-VH2-L2-VL2-L3-VL1-L4-CL; VL1-L1-VL2- L2-VH2-L3-VH1-L4-CH1-L5-CL; VH1-L1-VH2-L2-VL2-L3-VL1-L4-CH1-L5-CL; VL1-L1-VL2-L2-VH2-L3-VH1- L4-CL-L5-CH1; VH1-L1-VH2-L2-VL2-L3-VL1-L4-CL-L5-CH1; VL1-VL2-VH2-VH1-CH1-Fc; VH1-VH2-VL2-VL1-CH1-Fc; VL1-VL2-VH2-VH1-CL-Fc; VH1-VH2-VL2-VL1-CL-Fc; VL1-VL2-VH2-VH1-CH1-CL-Fc; VH1-VH2-VL2-VL1-CH1-CL-Fc; VL1-VL2-VH2-VH1-CL-CH1-Fc; VH1-VH2-VL2-VL1-CL-CH1-Fc; VL1-L1-VL2-L2-VH2-L3-VH1-L4-CH1-Fc; VH1-L1-VH2-L2-VL2-L3-VL1-L4-CH1-Fc; VL1-L1-VL2-L2-VH2-L3-VH1-L4-CL-Fc; VH1-L1-VH2-L2-VL2-L3-VL1-L4-CL-Fc; VL1-L1-VL2-L2-VH2-L3-VH1-L4-CH1-L5-CL-Fc; VH1-L1-VH2-L2-VL2-L3-VL1-L4-CH1-L5-CL-Fc; VL1-L1-VL2-L2-VH2-L3-VH1-L4-CL-L5-CH1-Fc; or VH1-L1-VH2-L2-VL2-L3-VL1-L4-CL-L5-CH1-Fc. In some aspects, the first polypeptide has a structure represented by VH1-L1-VH2-L2-VL2-L3-VL1-L4-CH1-Fc and the second polypeptide has a structure represented by Fc; VL1-VL2-VH2-VH1; VH1-VH2-VL2-VL1; VL1-L1-VL2-L2-VH2-L3-VH1; VH1-L1-VH2-L2-VL2-L3-VL1; VL1-VL2-VH2-VH1-Fc; VH1-VH2-VL2-VL1-Fc; VL1-L1-VL2-L2-VH2-L3-VH1-Fc; VH1-L1-VH2-L2-VL2-L3-VL1-Fc; VL1-L1-VL2-L2-VH2-L3-VH1-L4-Fc; VH1-L1-VH2-L2-VL2-L3-VL1-L4-Fc; VL1-VL2-VH2-VH1-CH1; VH1-VH2-VL2-VL1-CH1; VL1-VL2-VH2-VH1-CL; VH1-VH2-VL2-VL1-CL; VL1-VL2-VH2-VH1-CH1-CL; VH1-VH2-VL2-VL1-CH1-CL; VL1-VL2-VH2-VH1-CL-CH1; VH1-VH2-VL2-VL1-CL-CH1; VL1-L1-VL2-L2-VH2-L3-VH1-L4-CH1; VH1-L1-VH2-L2-VL2-L3-VL1-L4-CH1; VL1-L1-VL2-L2-VH2-L3-VH1-L4-CL; VH1-L1-VH2-L2-VL2-L3-VL1-L4-CL; VL1-L1-VL2-L2-VH2-L3- VH1-L4-CH1-L5-CL; VH1-L1-VH2-L2-VL2-L3-VL1-L4-CH1-L5-CL; VL1-L1-VL2-L2-VH2-L3-VH1-L4-CL-L5-CH1; VH1-L1-VH2-L2-VL2-L3-VL1-L4-CL-L5-CH1; VL1-VL2-VH2-VH1-CH1-Fc; VH1-VH2-VL2-VL1-CH1-Fc; VL1-VL2-VH2-VH1-CL-Fc; VH1-VH2-VL2-VL1-CL-Fc; VL1-VL2-VH2-VH1-CH1-CL-Fc; VH1-VH2-VL2-VL1-CH1-CL-Fc; VL1-VL2-VH2-VH1-CL-CH1-Fc; VH1-VH2-VL2-VL1-CL-CH1-Fc; VL1-L1-VL2-L2-VH2-L3-VH1-L4-CH1-Fc; VH1-L1-VH2-L2-VL2-L3-VL1-L4-CH1-Fc; VL1-L1-VL2-L2-VH2-L3-VH1-L4-CL-Fc; VH1-L1-VH2-L2-VL2-L3-VL1-L4-CL-Fc; VL1-L1-VL2-L2-VH2-L3-VH1-L4-CH1-L5-CL-Fc; VH1-L1-VH2-L2-VL2-L3-VL1-L4-CH1-L5-CL-Fc; VL1-L1-VL2-L2-VH2-L3-VH1-L4-CL-L5-CH1-Fc; or VH1-L1-VH2-L2-VL2-L3-VL1-L4-CL-L5-CH1-Fc. In some aspects, the first polypeptide has a structure represented by VL1-L1-VL2-L2-VH2-L3-VH1-L4-CL-Fc and the second polypeptide has a structure represented by Fc; VL1-VL2-VH2-VH1; VH1-VH2-VL2-VL1; VL1-L1-VL2-L2-VH2-L3-VH1; VH1-L1-VH2-L2-VL2-L3-VL1; VL1-VL2-VH2-VH1-Fc; VH1-VH2-VL2-VL1-Fc; VL1-L1-VL2-L2-VH2-L3-VH1-Fc; VH1-L1-VH2-L2-VL2-L3-VL1-Fc; VL1-L1-VL2-L2-VH2-L3-VH1-L4-Fc; VH1-L1-VH2-L2-VL2-L3-VL1-L4-Fc; VL1-VL2-VH2-VH1-CH1; VH1-VH2-VL2-VL1-CH1; VL1-VL2-VH2-VH1-CL; VH1-VH2-VL2-VL1-CL; VL1-VL2-VH2-VH1-CH1-CL; VH1-VH2-VL2-VL1-CH1-CL; VL1-VL2-VH2-VH1-CL-CH1; VH1-VH2-VL2-VL1-CL-CH1; VL1-L1-VL2-L2-VH2-L3-VH1-L4-CH1; VH1-L1-VH2-L2-VL2-L3-VL1-L4-CH1; VL1-L1- VL2-L2-VH2-L3-VH1-L4-CL; VH1-L1-VH2-L2-VL2-L3-VL1-L4-CL; VL1-L1-VL2-L2-VH2-L3-VH1-L4-CH1-L5- CL; VH1-L1-VH2-L2-VL2-L3-VL1-L4-CH1-L5-CL; VL1-L1-VL2-L2-VH2-L3-VH1-L4-CL-L5-CH1; VH1-L1-VH2- L2-VL2-L3-VL1-L4-CL-L5-CH1; VL1-VL2-VH2-VH1-CH1-Fc; VH1-VH2-VL2-VL1-CH1-Fc; VL1-VL2-VH2-VH1-CL-Fc; VH1-VH2-VL2-VL1-CL-Fc; VL1-VL2-VH2-VH1-CH1-CL-Fc; VH1-VH2-VL2-VL1-CH1-CL-Fc; VL1-VL2-VH2-VH1-CL-CH1-Fc; VH1-VH2-VL2-VL1-CL-CH1-Fc; VL1-L1-VL2-L2-VH2-L3-VH1-L4-CH1-Fc; VH1-L1-VH2-L2-VL2-L3-VL1-L4-CH1-Fc; VL1-L1-VL2-L2-VH2-L3-VH1-L4-CL-Fc; VH1-L1-VH2-L2-VL2-L3-VL1-L4-CL-Fc; VL1-L1-VL2-L2-VH2-L3-VH1-L4-CH1-L5-CL-Fc; VH1-L1-VH2-L2-VL2-L3-VL1-L4-CH1-L5-CL-Fc; VL1-L1-VL2-L2-VH2-L3-VH1-L4-CL-L5-CH1-Fc; or VH1-L1-VH2-L2-VL2-L3-VL1-L4-CL-L5-CH1-Fc. In some aspects, the first polypeptide has a structure represented by VH1-L1-VH2-L2-VL2-L3-VL1-L4-CL-Fc and the second polypeptide has a structure represented by Fc; VL1-VL2-VH2-VH1; VH1-VH2-VL2-VL1; VL1-L1-VL2-L2-VH2-L3-VH1; VH1-L1-VH2-L2-VL2-L3-VL1; VL1-VL2-VH2-VH1-Fc; VH1-VH2-VL2-VL1-Fc; VL1-L1-VL2-L2-VH2-L3-VH1-Fc; VH1-L1-VH2-L2-VL2-L3-VL1-Fc; VL1-L1-VL2-L2-VH2-L3-VH1-L4-Fc; VH1-L1-VH2-L2-VL2-L3-VL1-L4- Fc; VL1-VL2-VH2-VH1-CH1; VH1-VH2-VL2-VL1-CH1; VL1-VL2-VH2-VH1-CL; VH1-VH2-VL2-VL1-CL; VL1-VL2-VH2-VH1-CH1-CL; VH1-VH2-VL2-VL1-CH1-CL; VL1-VL2-VH2-VH1-CL-CH1; VH1-VH2-VL2-VL1-CL-CH1; VL1-L1-VL2-L2-VH2-L3-VH1-L4-CH1; VH1-L1-VH2-L2-VL2-L3-VL1-L4-CH1; VL1-L1-VL2-L2-VH2-L3-VH1-L4-CL; VH1-L1-VH2-L2-VL2-L3-VL1-L4-CL; VL1-L1-VL2-L2-VH2-L3-VH1-L4-CH1-L5-CL; VH1-L1-VH2-L2-VL2-L3-VL1-L4-CH1-L5-CL; VL1-L1-VL2-L2-VH2-L3-VH1-L4-CL-L5-CH1; VH1-L1-VH2-L2-VL2-L3-VL1- L4-CL-L5-CH1; VL1-VL2-VH2-VH1-CH1-Fc; VH1-VH2-VL2-VL1-CH1-Fc; VL1-VL2-VH2-VH1-CL-Fc; VH1-VH2-VL2-VL1-CL-Fc; VL1-VL2-VH2-VH1-CH1-CL-Fc; VH1-VH2-VL2-VL1-CH1-CL-Fc; VL1-VL2-VH2-VH1-CL-CH1-Fc; VH1-VH2-VL2-VL1-CL-CH1-Fc; VL1-L1-VL2-L2-VH2-L3-VH1-L4-CH1-Fc; VH1-L1-VH2-L2-VL2-L3-VL1-L4-CH1-Fc; VL1-L1-VL2-L2-VH2-L3-VH1-L4-CL-Fc; VH1-L1-VH2-L2-VL2-L3-VL1-L4-CL-Fc; VL1-L1-VL2-L2-VH2-L3-VH1-L4-CH1-L5-CL-Fc; VH1-L1-VH2-L2-VL2-L3-VL1-L4-CH1-L5-CL-Fc; VL1-L1-VL2-L2-VH2-L3-VH1-L4-CL-L5-CH1-Fc; or VH1-L1-VH2-L2-VL2-L3-VL1-L4-CL-L5-CH1-Fc. In some aspects, the first polypeptide has a structure represented by VL1-L1-VL2-L2-VH2-L3-VH1-L4-CH1-L5-CL-Fc and the second polypeptide has a structure represented by Fc; VL1-VL2-VH2-VH1; VH1-VH2-VL2-VL1; VL1-L1-VL2-L2-VH2-L3-VH1; VH1-L1-VH2-L2-VL2-L3-VL1; VL1-VL2-VH2-VH1-Fc; VH1-VH2-VL2-VL1-Fc; VL1-L1-VL2-L2-VH2-L3-VH1-Fc; VH1-L1-VH2-L2-VL2-L3-VL1-Fc; VL1-L1-VL2-L2-VH2-L3-VH1-L4-Fc; VH1-L1-VH2-L2-VL2-L3-VL1-L4-Fc; VL1-VL2-VH2-VH1-CH1; VH1-VH2-VL2-VL1-CH1; VL1-VL2-VH2-VH1-CL; VH1-VH2-VL2-VL1-CL; VL1-VL2-VH2-VH1-CH1-CL; VH1-VH2-VL2-VL1-CH1-CL; VL1-VL2-VH2-VH1-CL-CH1; VH1-VH2-VL2-VL1-CL-CH1; VL1-L1-VL2-L2-VH2-L3-VH1-L4-CH1; VH1-L1-VH2-L2-VL2-L3-VL1-L4-CH1; VL1-L1-VL2-L2- VH2-L3-VH1-L4-CL; VH1-L1-VH2-L2-VL2-L3-VL1-L4-CL; VL1-L1-VL2-L2-VH2-L3-VH1-L4-CH1-L5-CL; VH1-L1-VH2-L2-VL2-L3-VL1-L4-CH1-L5-CL; VL1-L1-VL2-L2-VH2-L3-VH1-L4-CL-L5-CH1; VH1-L1-VH2-L2-VL2- L3-VL1-L4-CL-L5-CH1; VL1-VL2-VH2-VH1-CH1-Fc; VH1-VH2-VL2-VL1-CH1-Fc; VL1-VL2-VH2-VH1-CL-Fc; VH1-VH2-VL2-VL1-CL-Fc; VL1-VL2-VH2-VH1-CH1-CL-Fc; VH1-VH2-VL2-VL1-CH1-CL-Fc; VL1-VL2-VH2-VH1-CL-CH1-Fc; VH1-VH2-VL2-VL1-CL-CH1-Fc; VL1-L1-VL2-L2-VH2-L3-VH1-L4-CH1-Fc; VH1-L1-VH2-L2-VL2-L3-VL1-L4-CH1-Fc; VL1-L1-VL2-L2-VH2-L3-VH1-L4-CL-Fc; VH1-L1-VH2-L2-VL2-L3-VL1-L4-CL-Fc; VL1-L1-VL2-L2-VH2-L3-VH1-L4-CH1-L5-CL-Fc; VH1-L1-VH2-L2-VL2-L3-VL1-L4-CH1-L5-CL-Fc; VL1-L1-VL2-L2-VH2-L3-VH1-L4-CL-L5-CH1-Fc; or VH1-L1-VH2-L2-VL2-L3-VL1-L4-CL-L5-CH1-Fc. In some aspects, the first polypeptide has a structure represented by VH1-L1-VH2-L2-VL2-L3-VL1-L4-CH1-L5-CL-Fc and the second polypeptide has a structure represented by Fc; VL1-VL2-VH2-VH1; VH1-VH2-VL2-VL1; VL1-L1-VL2-L2-VH2-L3-VH1; VH1-L1-VH2-L2-VL2-L3-VL1; VL1-VL2-VH2-VH1-Fc; VH1-VH2-VL2-VL1-Fc; VL1-L1-VL2-L2-VH2-L3-VH1-Fc; VH1-L1-VH2-L2-VL2-L3-VL1-Fc; VL1-L1-VL2-L2-VH2-L3-VH1-L4-Fc; VH1-L1-VH2-L2-VL2-L3-VL1-L4-Fc; VL1-VL2-VH2-VH1-CH1; VH1-VH2-VL2-VL1-CH1; VL1-VL2-VH2-VH1-CL; VH1-VH2-VL2-VL1-CL; VL1-VL2-VH2-VH1-CH1-CL; VH1-VH2-VL2-VL1-CH1-CL; VL1-VL2-VH2-VH1-CL-CH1; VH1-VH2-VL2-VL1-CL-CH1; VL1-L1-VL2-L2-VH2-L3-VH1-L4-CH1; VH1-L1-VH2-L2-VL2-L3-VL1-L4-CH1; VL1-L1-VL2-L2- VH2-L3-VH1-L4-CL; VH1-L1-VH2-L2-VL2-L3-VL1-L4-CL; VL1-L1-VL2-L2-VH2-L3-VH1-L4-CH1-L5-CL; VH1-L1-VH2-L2-VL2-L3-VL1-L4-CH1-L5-CL; VL1-L1-VL2-L2-VH2-L3-VH1-L4-CL-L5-CH1; VH1-L1-VH2-L2-VL2- L3-VL1-L4-CL-L5-CH1; VL1-VL2-VH2-VH1-CH1-Fc; VH1-VH2-VL2-VL1-CH1-Fc; VL1-VL2-VH2-VH1-CL-Fc; VH1-VH2-VL2-VL1-CL-Fc; VL1-VL2-VH2-VH1-CH1-CL-Fc; VH1-VH2-VL2-VL1-CH1-CL-Fc; VL1-VL2-VH2-VH1-CL-CH1-Fc; VH1-VH2-VL2-VL1-CL-CH1-Fc; VL1-L1-VL2-L2-VH2-L3-VH1-L4-CH1-Fc; VH1-L1-VH2-L2-VL2-L3-VL1-L4-CH1-Fc; VL1-L1-VL2-L2-VH2-L3-VH1-L4-CL-Fc; VH1-L1-VH2-L2-VL2-L3-VL1-L4-CL-Fc; VL1-L1-VL2-L2-VH2-L3-VH1-L4-CH1-L5-CL-Fc; VH1-L1-VH2-L2-VL2-L3-VL1-L4-CH1-L5. In some aspects, the first polypeptide has a structure represented by VL1-L1-VL2-L2-VH2-L3-VH1-L4-CL-L5-CH1-Fc and the second polypeptide has a structure represented by Fc; VL1-VL2-VH2-VH1; VH1-VH2-VL2-VL1; VL1-L1-VL2-L2-VH2-L3-VH1; VH1-L1-VH2-L2-VL2-L3-VL1; VL1-VL2-VH2-VH1-Fc; VH1-VH2-VL2-VL1-Fc; VL1-L1-VL2-L2-VH2-L3-VH1-Fc; VH1-L1-VH2-L2-VL2-L3-VL1-Fc; VL1-L1-VL2-L2-VH2-L3-VH1-L4-Fc; VH1-L1-VH2-L2-VL2-L3-VL1-L4-Fc; VL1-VL2-VH2-VH1-CH1; VH1-VH2-VL2-VL1-CH1; VL1-VL2-VH2-VH1-CL; VH1-VH2-VL2-VL1-CL; VL1-VL2-VH2-VH1-CH1-CL; VH1-VH2-VL2-VL1-CH1-CL; VL1-VL2-VH2-VH1-CL-CH1; VH1-VH2-VL2-VL1-CL-CH1; VL1-L1-VL2-L2-VH2-L3-VH1-L4-CH1; VH1-L1-VH2-L2-VL2-L3-VL1-L4-CH1; VL1-L1-VL2-L2- VH2-L3-VH1-L4-CL; VH1-L1-VH2-L2-VL2-L3-VL1-L4-CL; VL1-L1-VL2-L2-VH2-L3-VH1-L4-CH1-L5-CL; VH1-L1-VH2-L2-VL2-L3-VL1-L4-CH1-L5-CL; VL1-L1-VL2-L2-VH2-L3-VH1-L4-CL-L5-CH1; VH1-L1-VH2-L2-VL2- L3-VL1-L4-CL-L5-CH1; VL1-VL2-VH2-VH1-CH1-Fc; VH1-VH2-VL2-VL1-CH1-Fc; VL1-VL2-VH2-VH1-CL-Fc; VH1-VH2-VL2-VL1-CL-Fc; VL1-VL2-VH2-VH1-CH1-CL-Fc; VH1-VH2-VL2-VL1-CH1-CL-Fc; VL1-VL2-VH2-VH1-CL-CH1-Fc; VH1-VH2-VL2-VL1-CL-CH1-Fc; VL1-L1-VL2-L2-VH2-L3-VH1-L4-CH1-Fc; VH1-L1-VH2-L2-VL2-L3-VL1-L4-CH1-Fc; VL1-L1-VL2-L2-VH2-L3-VH1-L4-CL-Fc; VH1-L1-VH2-L2-VL2-L3-VL1-L4-CL-Fc; VL1-L1-VL2-L2-VH2-L3-VH1-L4-CH1-L5-CL-Fc; VH1-L1-VH2-L2-VL2-L3-VL1-L4-CH1-L5-CL-Fc; VL1-L1-VL2-L2-VH2-L3-VH1-L4-CL-L5-CH1-Fc; or VH1-L1-VH2-L2-VL2-L3-VL1-L4-CL-L5-CH1-Fc. In some aspects, the first polypeptide has a structure represented by VH1-L1-VH2-L2-VL2-L3-VL1-L4-CL-L5-CH1-Fc and the second polypeptide has a structure represented by Fc; VL1-VL2-VH2-VH1; VH1-VH2-VL2-VL1; VL1-L1-VL2-L2-VH2-L3-VH1; VH1-L1-VH2-L2-VL2-L3-VL1; VL1-VL2-VH2-VH1-Fc; VH1-VH2-VL2-VL1-Fc; VL1-L1-VL2-L2-VH2-L3-VH1-Fc; VH1-L1-VH2-L2-VL2-L3-VL1-Fc; VL1-L1-VL2-L2-VH2-L3-VH1-L4-Fc; VH1-L1-VH2-L2-VL2-L3-VL1-L4-Fc; VL1-VL2-VH2-VH1-CH1; VH1-VH2-VL2-VL1-CH1; VL1-VL2-VH2-VH1-CL; VH1-VH2-VL2-VL1-CL; VL1-VL2-VH2-VH1-CH1-CL; VH1-VH2-VL2-VL1-CH1-CL; VL1-VL2-VH2-VH1-CL-CH1; VH1-VH2-VL2-VL1-CL-CH1; VL1-L1-VL2-L2-VH2-L3-VH1-L4-CH1; VH1-L1-VH2-L2-VL2-L3-VL1-L4-CH1; VL1-L1-VL2-L2- VH2-L3-VH1-L4-CL; VH1-L1-VH2-L2-VL2-L3-VL1-L4-CL; VL1-L1-VL2-L2-VH2-L3-VH1-L4-CH1-L5-CL; VH1-L1-VH2-L2-VL2-L3-VL1-L4-CH1-L5-CL; VL1-L1-VL2-L2-VH2-L3-VH1-L4-CL-L5-CH1; VH1-L1-VH2-L2-VL2- L3-VL1-L4-CL-L5-CH1; VL1-VL2-VH2-VH1-CH1-Fc; VH1-VH2-VL2-VL1-CH1-Fc; VL1-VL2-VH2-VH1-CL-Fc; VH1-VH2-VL2-VL1-CL-Fc; VL1-VL2-VH2-VH1-CH1-CL-Fc; VH1-VH2-VL2-VL1-CH1-CL-Fc; VL1-VL2-VH2-VH1-CL-CH1-Fc; VH1-VH2-VL2-VL1-CL-CH1-Fc; VL1-L1-VL2-L2-VH2-L3-VH1-L4-CH1-Fc; VH1-L1-VH2-L2-VL2-L3-VL1-L4-CH1-Fc; VL1-L1-VL2-L2-VH2-L3-VH1-L4-CL-Fc; VH1-L1-VH2-L2-VL2-L3-VL1-L4-CL-Fc; VL1-L1-VL2-L2-VH2-L3-VH1-L4-CH1-L5-CL-Fc; VH1-L1-VH2-L2-VL2-L3-VL1-L4-CH1-L5-CL-Fc; VL1-L1-VL2-L2-VH2-L3-VH1-L4-CL-L5-CH1-Fc; or VH1-L1-VH2-L2-VL2-L3-VL1-L4-CL-L5-CH1-Fc. The VL1, VL2, VH1, and/or VH2 may specifically bind to A2AR, APRIL, ATPDase, BAFF, BAFFR, BCMA, BlyS, BTK, BTLA, B7DC, B7H1, B7H2, B7H3, B7H4, B7H5, B7H6, B7H7, B7RP1, B7-4, C3, C5, CCL2, CCL3, CCL4, CCL5, CCL7, CCL8, CCL11, CCL15, CCL17, CCL19, CCL20, CCL21, CCL25 CCR3, CCR4, CD3, CD16A, CD19, CD20, CD24, CD27, CD28, CD30, CD38, CD39, CD40, CD40L, CD47, CD52, CD70, CD80, CD86, CD123, CD133, CD137, CD137L, CD160, CD272, CEACAM5, CLEC9, CLEC91, CRTH2, CSF-1, CSF-2, CSF-3, CXCL1, CXCL2, CXCL4, CXCL12, CXCL13, CXCR3, cMet, CTLA4, DLL3, DLL4, DNGR-1, E-cadherin, EGFR, ENTPD1, EpCAM, FCER1, FCER1A, FCER2, FGFR, FLAP, FOLH1, Gi24, GITR, GITRL, GPR5, GP100, GPRC5D, HER2, HER3, ICOSL, ICOS, HHLA2, HMGB1, HVEM, IDO, IFNa, IgE, IGF1R, IL2Rbeta, IL1, ILIA, IL1B, IL1F10, IL2, IL4, IL4Ra, IL5, IL5R, IL6, IL7, IL7Ra, IL8, IL9, IL9R, IL10, rhIL1O, IL12, IL13, IL13Ra1, IL13Ra2, IL15, IL17, IL17Rb, IL18, IL22, IL23, IL25, IL7, IL33, IL35, ITGB4, ITK, KIR, LAG3, LAMP1, leptin, LPFS2, MHC class II, MUC-1, MUC-16, NCR3LG1, NKG2D, NKp46, NTPDase-1, OX40, OX40L, PD-1, PD-L1, PD-L2, PROM1, S152, SIRPalpha, SISP1, SLC, SPG64, ST2, STEAP1, STEAP2, Syk kinase, STEAP1, TROP2, TACI, TDO, TGFBETA, T14, TIGIT, TIM3, TLR, TLR2, TLR4, TLR5, TLR9, TMEF1, TNFa, TNFRSF7, Tp55, TREM1, TSLP, TSLPR, TWEAK, VEGF, VISTA, Vstm3, or WUCAM. For the avoidance of doubt, all the antigen binding polypeptide complex structures described herein can be combined with any one or more of the targets described herein. Any and all disclosure herein in relation to targets for antigen binding polypeptides of the invention is generally applicable, and applies equally and without reservation to each and every antigen binding polypeptide and antigen binding polypeptide complex described herein. For the avoidance of doubt, the VL1, VL2, VH1, and/or VH2 of each and every antigen binding polypeptide and antigen binding polypeptide complex described herein may independently bind to any one of said particularly preferred targets. Any and all disclosure herein in relation to targets for antigen binding polypeptides of the invention is generally applicable, and applies equally and without reservation to each and every antigen binding polypeptide and antigen binding polypeptide complex described herein. For the avoidance of doubt, the VL1, VL2, VH1, and/or VH2 of each and every antigen binding polypeptide and antigen binding polypeptide complex described herein may independently bind to any one of said particularly preferred targets.

[0164] In other aspects, the invention is directed to an antigen binding polypeptide or antigen binding polypeptide complex comprising a polypeptide having a structure represented by VL1-VL2-VH2-VH1-CH3; VH1-VH2-VL2-VL1-CH3; VL1-L1-VL2-L2-VH2-L3-VH1-CH3; VH1-L1-VH2-L2-VL2-L3-VL1-CH3; VL1-L1-VL2-L2- VH2-L3-VH1-L4-CH3; VH1-L1-VH2-L2-VL2-L3-VL1-L4-CH3; VL1-VL2-VH2-VH1-CH3-CH3; VH1-VH2-VL2-VL1-CH3-CH3; VL1-L1-VL2-L2-VH2-L3-VH1-CH3-CH3; VH1-L1-VH2-L2-VL2-L3-VL1-CH3-CH3; VL1-L1-VL2- L2-VH2-L3-VH1-L4-CH3-CH3; VH1-L1-VH2-L2-VL2-L3-VL1-L4-CH3-CH3; VL1-L1-VL2-L2-VH2-L3-VH1-L4-CH3-L5-CH3; or VH1-L1-VH2-L2-VL2-L3-VL1-L4-CH3-L5-CH3; wherein VL1 is a first immunoglobulin light chain variable region that specifically binds to A2AR, APRIL, ATPDase, BAFF, BAFFR, BCMA, BlyS, BTK, BTLA, B7DC, B7H1, B7H2, B7H3, B7H4, B7H5, B7H6, B7H7, B7RP1, B7-4, C3, C5, CCL2, CCL3, CCL4, CCL5, CCL7, CCL8, CCL11, CCL15, CCL17, CCL19, CCL20, CCL21, CCL25 CCR3, CCR4, CD3, CD16A, CD19, CD20, CD24, CD27, CD28, CD30, CD38, CD39, CD40, CD40L, CD47, CD52, CD70, CD80, CD86, CD123, CD133, CD137, CD137L, CD160, CD272, CEACAM5, CLEC9, CLEC91, CRTH2, CSF-1, CSF-2, CSF-3, CXCL1, CXCL2, CXCL4, CXCL12, CXCL13, CXCR3, cMet, CTLA4, DLL3, DLL4, DNGR-1, E-cadherin, EGFR, ENTPD1, EpCAM, FCER1, FCER1A, FCER2, FGFR, FLAP, FOLH1, Gi24, GITR, GITRL, GPR5, GP100, GPRC5D, HER2, HER3, ICOSL, ICOS, HHLA2, HMGB1, HVEM, IDO, IFNa, IgE, IGF1R, IL2Rbeta, IL1, ILIA, IL1B, IL1F10, IL2, IL4, IL4Ra, IL5, IL5R, IL6, IL7Ra, IL8, IL9, IL9R, IL10, rhIL1O, IL12, IL13, IL13Ra1, IL13Ra2, IL15, IL17, IL17Rb, IL18, IL22, IL23, IL25, IL7, IL33, IL35, ITGB4, ITK, KIR, LAG3, LAMP1, leptin, LPFS2, MHC class II, MUC-1, MUC-16, NCR3LG1, NKG2D, NKp46, NTPDase-1, OX40, OX40L, PD-1, PD-L1, PD-L2, PROM1, S152, SIRPalpha, SISP1, SLC, SPG64, ST2, STEAP1, STEAP2, Syk kinase, STEAP1, TROP2, TACI, TDO, TGFBETA, T14, TIGIT, TIM3, TLR, TLR2, TLR4, TLR5, TLR9, TMEF1, TNFa, TNFRSF7, Tp55, TREM1, TSLP, TSLPR, TWEAK, VEGF, VISTA, Vstm3, or WUCAM; VL2 is a second immunoglobulin light chain variable region that specifically binds to A2AR, APRIL, ATPDase, BAFF, BAFFR, BCMA, BlyS, BTK, BTLA, B7DC, B7H1, B7H2, B7H3, B7H4, B7H5, B7H6, B7H7, B7RP1, B7-4, C3, C5, CCL2, CCL3, CCL4, CCLS, CCL7, CCL8, CCL11, CCL15, CCL17, CCL19, CCL20, CCL21, CCL25 CCR3, CCR4, CD3, CD16A, CD19, CD20, CD24, CD27, CD28, CD30, CD38, CD39, CD40, CD40L, CD47, CD52, CD70, CD80, CD86, CD123, CD133, CD137, CD137L, CD160, CD272, CEACAM5, CLEC9, CLEC91, CRTH2, CSF-1, CSF-2, CSF-3, CXCL1, CXCL2, CXCL4, CXCL12, CXCL13, CXCR3, cMet, CTLA4, DLL3, DLL4, DNGR-1, E-cadherin, EGFR, ENTPD1, EpCAM, FCER1, FCER1A, FCER2, FGFR, FLAP, FOLH1, Gi24, GITR, GITRL, GPR5, GP100, GPRC5D, HER2, HER3, ICOSL, ICOS, HHLA2, HMGB1, HVEM, IDO, IFNa, IgE, IGF1R, IL2Rbeta, IL1, ILIA, IL1B, IL1F10, IL2, IL4, IL4Ra, IL5, IL5R, IL6, IL7, IL7Ra, IL8, IL9, IL9R, IL10, rhIL1O, IL12, IL13, IL13Ra1, IL13Ra2, IL15, IL17, IL17Rb, IL18, IL22, IL23, IL25, IL7, IL33, IL35, ITGB4, ITK, KIR, LAG3, LAMP1, leptin, LPFS2, MHC class II, MUC-1, MUC-16, NCR3LG1, NKG2D, NKp46, NTPDase-1, OX40, OX40L, PD-1, PD-L1, PD-L2, PROM1, S152, SIRPalpha, SISP1, SLC, SPG64, ST2, STEAP1, STEAP2, Syk kinase, STEAP1, TROP2, TACI, TDO, TGFBETA, T14, TIGIT, TIM3, TLR, TLR2, TLR4, TLR5, TLR9, TMEF1, TNFa, TNFRSF7, Tp55, TREM1, TSLP, TSLPR, TWEAK, VEGF, VISTA, Vstm3, or WUCAM; VH1 is a first immunoglobulin heavy chain variable region that specifically binds to A2AR, APRIL, ATPDase, BAFF, BAFFR, BCMA, BlyS, BTK, BTLA, B7DC, B7H1, B7H2, B7H3, B7H4, B7H5, B7H6, B7H7, B7RP1, B7-4, C3, C5, CCL2, CCL3, CCL4, CCLS, CCL7, CCL8, CCL11, CCL15, CCL17, CCL19, CCL20, CCL21, CCL25 CCR3, CCR4, CD3, CD16A, CD19, CD20, CD24, CD27, CD28, CD30, CD38, CD39, CD40, CD40L, CD47, CD52, CD70, CD80, CD86, CD123, CD133, CD137, CD137L, CD160, CD272, CEACAM5, CLEC9, CLEC91, CRTH2, CSF-1, CSF-2, CSF-3, CXCL1, CXCL2, CXCL4, CXCL12, CXCL13, CXCR3, cMet, CTLA4, DLL3, DLL4, DNGR-1, E-cadherin, EGFR, ENTPD1, EpCAM, FCER1, FCER1A, FCER2, FGFR, FLAP, FOLH1, Gi24, GITR, GITRL, GPR5, GP100, GPRC5D, HER2, HER3, ICOSL, ICOS, HHLA2, HMGB1, HVEM, IDO, IFNa, IgE, IGF1R, IL2Rbeta, IL1, ILIA, IL1B, IL1F10, IL2, IL4, IL4Ra, IL5, IL5R, IL6, IL7, IL7Ra, IL9, IL9R, IL10, rhIL1O, IL12, IL13, IL13Ra1, IL13Ra2, IL15, IL17, IL17Rb, IL18, IL22, IL23, IL25, IL7, IL33, IL35, ITGB4, ITK, KIR, LAG3, LAMP1, leptin, LPFS2, MHC class II, MUC-1, MUC-16, NCR3LG1, NKG2D, NKp46, NTPDase-1, OX40, OX40L, PD-1, PD-L1, PD-L2, PROM1, S152, SIRPalpha, SISP1, SLC, SPG64, ST2, STEAP1, STEAP2, Syk kinase, STEAP1, TROP2, TACI, TDO, TGFBETA, T14, TIGIT, TIM3, TLR, TLR2, TLR4, TLR5, TLR9, TMEF1, TNFa, TNFRSF7, Tp55, TREM1, TSLP, TSLPR, TWEAK, VEGF, VISTA, Vstm3, or WUCAM; VH2 is a second immunoglobulin heavy chain variable region that specifically binds to A2AR, APRIL, ATPDase, BAFF, BAFFR, BCMA, BlyS, BTK, BTLA, B7DC, B7H1, B7H2, B7H3, B7H4, B7H5, B7H6, B7H7, B7RP1, B7-4, C3, C5, CCL2, CCL3, CCL4, CCL5, CCL7, CCL8, CCL11, CCL15, CCL17, CCL19, CCL20, CCL21, CCL25 CCR3, CCR4, CD3, CD16A, CD19, CD20, CD24, CD27, CD28, CD30, CD38, CD39, CD40, CD40L, CD47, CD52, CD70, CD80, CD86, CD123, CD133, CD137, CD137L, CD160, CD272, CEACAM5, CLEC9, CLEC91, CRTH2, CSF-1, CSF-2, CSF-3, CXCL1, CXCL2, CXCL4, CXCL12, CXCL13, CXCR3, cMet, CTLA4, DLL3, DLL4, DNGR-1, E-cadherin, EGFR, ENTPD1, EpCAM, FCER1, FCER1A, FCER2, FGFR, FLAP, FOLH1, Gi24, GITR, GITRL, GPR5, GP100, GPRC5D, HER2, HER3, ICOSL, ICOS, HHLA2, HMGB1, HVEM, IDO, IFNa, IgE, IGF1R, IL2Rbeta, IL1, ILIA, IL1B, IL1F10, IL2, IL4, IL4Ra, IL5, IL5R, IL6, IL7, IL7Ra, IL8, IL9, IL9R, IL10, rhIL1O, IL12, IL13, IL13Ra1, IL13Ra2, IL15, IL17, IL17Rb, IL18, IL22, IL23, IL25, IL7, IL33, IL35, ITGB4, ITK, KIR, LAG3, LAMP1, leptin, LPFS2, MHC class II, MUC-1, MUC-16, NCR3LG1, NKG2D, NKp46, NTPDase-1, OX40, OX40L, PD-1, PD-L1, PD-L2, PROM1, S152, SIRPalpha, SISP1, SLC, SPG64, ST2, STEAP1, STEAP2, Syk kinase, STEAP1, TROP2, TACI, TDO, TGFBETA, T14, TIGIT, TIM3, TLR, TLR2, TLR4, TLR5, TLR9, TMEF1, TNFa, TNFRSF7, Tp55, TREM1, TSLP, TSLPR, TWEAK, VEGF, VISTA, Vstm3, or WUCAM; CH3 is an immunoglobulin heavy chain constant region 3; and L1, L2, L3, L4 and L5 are amino acid linkers. In other aspects, the invention is directed to an antigen binding polypeptide or antigen binding polypeptide complex comprising a polypeptide having the structure represented by VL1-VL2-VH2-VH1-CH3, wherein VL1, VL2, VH1 and/or VH2 specifically binds to A2AR, APRIL, ATPDase, BAFF, BAFFR, BCMA, BlyS, BTK, BTLA, B7DC, B7H1, B7H2, B7H3, B7H4, B7H5, B7H6, B7H7, B7RP1, B7-4, C3, C5, CCL2, CCL3, CCL4, CCL5, CCL7, CCL8, CCL11, CCL15, CCL17, CCL19, CCL20, CCL21, CCL25 CCR3, CCR4, CD3, CD16A, CD19, CD20, CD24, CD27, CD28, CD30, CD38, CD39, CD40, CD40L, CD47, CD52, CD70, CD80, CD86, CD123, CD133, CD137, CD137L, CD160, CD272, CEACAM5, CLEC9, CLEC91, CRTH2, CSF-1, CSF-2, CSF-3, CXCL1, CXCL2, CXCL4, CXCL12, CXCL13, CXCR3, cMet, CTLA4, DLL3, DLL4, DNGR-1, E-cadherin, EGFR, ENTPD1, EpCAM, FCER1, FCER1A, FCER2, FGFR, FLAP, FOLH1, Gi24, GITR, GITRL, GPR5, GP100, GPRC5D, HER2, HER3, ICOSL, ICOS, HHLA2, HMGB1, HVEM, IDO, IFNa, IgE, IGF1R, IL2Rbeta, IL1, ILIA, IL1B, IL1F10, IL2, IL4, IL4Ra, IL5, IL5R, IL6, IL7, IL7Ra, IL8, IL9, IL9R, IL10, rhIL1O, IL12, IL13, IL13Ra1, IL13Ra2, IL15, IL17, IL17Rb, IL18, IL22, IL23, IL25, IL7, IL33, IL35, ITGB4, ITK, KIR, LAG3, LAMP1, leptin, LPFS2, MHC class II, MUC-1, MUC-16, NCR3LG1, NKG2D, NKp46, NTPDase-1, OX40, OX40L, PD-1, PD-L1, PD-L2, PROM1, S152, SIRPalpha, SISP1, SLC, SPG64, ST2, STEAP1, STEAP2, Syk kinase, STEAP1, TROP2, TACI, TDO, TGFBETA, T14, TIGIT, TIM3, TLR, TLR2, TLR4, TLR5, TLR9, TMEF1, TNFa, TNFRSF7, Tp55, TREM1, TSLP, TSLPR, TWEAK, VEGF, VISTA, Vstm3, or WUCAM. In other aspects, the invention is directed to an antigen binding polypeptide or antigen binding polypeptide complex comprising a polypeptide having the structure represented by VH1-VH2-VL2-VL1-CH3, wherein VL1, VL2, VH1 and/or VH2 specifically binds to A2AR, APRIL, ATPDase, BAFF, BAFFR, BCMA, BlyS, BTK, BTLA, B7DC, B7H1, B7H2, B7H3, B7H4, B7H5, B7H6, B7H7, B7RP1, B7-4, C3, C5, CCL2, CCL3, CCL4, CCL5, CCL7, CCL8, CCL11, CCL15, CCL17, CCL19, CCL20, CCL21, CCL25 CCR3, CCR4, CD3, CD16A, CD19, CD20, CD24, CD27, CD28, CD30, CD38, CD39, CD40, CD40L, CD47, CD52, CD70, CD80, CD86, CD123, CD133, CD137, CD137L, CD160, CD272, CEACAM5, CLEC9, CLEC91, CRTH2, CSF-1, CSF-2, CSF-3, CXCL1, CXCL2, CXCL4, CXCL12, CXCL13, CXCR3, cMet, CTLA4, DLL3, DLL4, DNGR-1, E-cadherin, EGFR, ENTPD1, EpCAM, FCER1, FCER1A, FCER2, FGFR, FLAP, FOLH1, Gi24, GITR, GITRL, GPR5, GP100, GPRC5D, HER2, HER3, ICOSL, ICOS, HHLA2, HMGB1, HVEM, IDO, IFNa, IgE, IGF1R, IL2Rbeta, IL1, ILIA, IL1B, IL1F10, IL2, IL4, IL4Ra, IL5, IL5R, IL6, IL7, IL7Ra, IL8, IL9, IL9R, IL10, rhIL1O, IL12, IL13, IL13Ra1, IL13Ra2, IL15, IL17, IL17Rb, IL18, IL22, IL23, IL25, IL7, IL33, IL35, ITGB4, ITK, KIR, LAG3, LAMP1, leptin, LPFS2, MHC class II, MUC-1, MUC-16, NCR3LG1, NKG2D, NKp46, NTPDase-1, OX40, OX40L, PD-1, PD-L1, PD-L2, PROM1, S152, SIRPalpha, SISP1, SLC, SPG64, ST2, STEAP1, STEAP2, Syk kinase, STEAP1, TROP2, TACI, TDO, TGFBETA, T14, TIGIT, TIM3, TLR, TLR2, TLR4, TLR5, TLR9, TMEF1, TNFa, TNFRSF7, Tp55, TREM1, TSLP, TSLPR, TWEAK, VEGF, VISTA, Vstm3, or WUCAM. In other aspects, the invention is directed to an antigen binding polypeptide or antigen binding polypeptide complex comprising a polypeptide having the structure represented by VL1-L1-VL2-L2-VH2-L3-VH1-CH3, wherein VL1, VL2, VH1 and/or VH2 specifically binds to A2AR, APRIL, ATPDase, BAFF, BAFFR, BCMA, BlyS, BTK, BTLA, B7DC, B7H1, B7H2, B7H3, B7H4, B7H5, B7H6, B7H7, B7RP1, B7-4, C3, C5, CCL2, CCL3, CCL4, CCL5, CCL7, CCL8, CCL11, CCL15, CCL17, CCL19, CCL20, CCL21, CCL25 CCR3, CCR4, CD3, CD16A, CD19, CD20, CD24, CD27, CD28, CD30, CD38, CD39, CD40, CD40L, CD47, CD52, CD70, CD80, CD86, CD123, CD133, CD137, CD137L, CD160, CD272, CEACAM5, CLEC9, CLEC91, CRTH2, CSF-1, CSF-2, CSF-3, CXCL1, CXCL2, CXCL4, CXCL12, CXCL13, CXCR3, cMet, CTLA4, DLL3, DLL4, DNGR-1, E-cadherin, EGFR, ENTPD1, EpCAM, FCER1, FCER1A, FCER2, FGFR, FLAP, FOLH1, Gi24, GITR, GITRL, GPR5, GP100, GPRC5D, HER2, HER3, ICOSL, ICOS, HHLA2, HMGB1, HVEM, IDO, IFNa, IgE, IGF1R, IL2Rbeta, IL1, ILIA, IL1B, IL1F10, IL2, IL4, IL4Ra, IL5, IL5R, IL6, IL7, IL7Ra, IL8, IL9, IL9R, IL10, rhIL1O, IL12, IL13, IL13Ra1, IL13Ra2, IL15, IL17, IL17Rb, IL18, IL22, IL23, IL25, IL7, IL33, IL35, ITGB4, ITK, KIR, LAG3, LAMP1, leptin, LPFS2, MHC class II, MUC-1, MUC-16, NCR3LG1, NKG2D, NKp46, NTPDase-1, OX40, OX40L, PD-1, PD-L1, PD-L2, PROM1, S152, SIRPalpha, SISP1, SLC, SPG64, ST2, STEAP1, STEAP2, Syk kinase, STEAP1, TROP2, TACI, TDO, TGFBETA, T14, TIGIT, TIM3, TLR, TLR2, TLR4, TLR5, TLR9, TMEF1, TNFa, TNFRSF7, Tp55, TREM1, TSLP, TSLPR, TWEAK, VEGF, VISTA, Vstm3, or WUCAM. In other aspects, the invention is directed to an antigen binding polypeptide or antigen binding polypeptide complex comprising a polypeptide having the structure represented by VH1-L1-VH2-L2-VL2-L3-VL1-CH3, wherein VL1, VL2, VH1 and/or VH2 specifically binds to A2AR, APRIL, ATPDase, BAFF, BAFFR, BCMA, BlyS, BTK, BTLA, B7DC, B7H1, B7H2, B7H3, B7H4, B7H5, B7H6, B7H7, B7RP1, B7-4, C3, C5, CCL2, CCL3, CCL4, CCL5, CCL7, CCL8, CCL11, CCL15, CCL17, CCL19, CCL20, CCL21, CCL25 CCR3, CCR4, CD3, CD16A, CD19, CD20, CD24, CD27, CD28, CD30, CD38, CD39, CD40, CD40L, CD47, CD52, CD70, CD80, CD86, CD123, CD133, CD137, CD137L, CD160, CD272, CEACAM5, CLEC9, CLEC91, CRTH2, CSF-1, CSF-2, CSF-3, CXCL1, CXCL2, CXCL4, CXCL12, CXCL13, CXCR3, cMet, CTLA4, DLL3, DLL4, DNGR-1, E-cadherin, EGFR, ENTPD1, EpCAM, FCER1, FCER1A, FCER2, FGFR, FLAP, FOLH1, Gi24, GITR, GITRL, GPR5, GP100, GPRC5D, HER2, HER3, ICOSL, ICOS, HHLA2, HMGB1, HVEM, IDO, IFNa, IgE, IGF1R, IL2Rbeta, IL1, ILIA, IL1B, IL1F10, IL2, IL4, IL4Ra, IL5, IL5R, IL6, IL7, IL7Ra, IL8, IL9, IL9R, IL10, rhIL1O, IL12, IL13, IL13Ra1, IL13Ra2, IL15, IL17, IL17Rb, IL18, IL22, IL23, IL25, IL7, IL33, IL35, ITGB4, ITK, KIR, LAG3, LAMP1, leptin, LPFS2, MHC class II, MUC-1, MUC-16, NCR3LG1, NKG2D, NKp46, NTPDase-1, OX40, OX40L, PD-1, PD-L1, PD-L2, PROM1, S152, SIRPalpha, SISP1, SLC, SPG64, ST2, STEAP1, STEAP2, Syk kinase, STEAP1, TROP2, TACI, TDO, TGFBETA, T14, TIGIT, TIM3, TLR, TLR2, TLR4, TLR5, TLR9, TMEF1, TNFa, TNFRSF7, Tp55, TREM1, TSLP, TSLPR, TWEAK, VEGF, VISTA, Vstm3, or WUCAM. In other aspects, the invention is directed to an antigen binding polypeptide or antigen binding polypeptide complex comprising a polypeptide having the structure represented by VII-L1-VL2-L2-VH2-L3-VH1-L4-CH3, wherein VL1, VL2, VH1 and/or VH2 specifically binds to A2AR, APRIL, ATPDase, BAFF, BAFFR, BCMA, BlyS, BTK, BTLA, B7DC, B7H1, B7H2, B7H3, B7H4, B7H5, B7H6, B7H7, B7RP1, B7-4, C3, C5, CCL2, CCL3, CCL4, CCL5, CCL7, CCL8, CCL11, CCL15, CCL17, CCL19, CCL20, CCL21, CCL25 CCR3, CCR4, CD3, CD16A, CD19, CD20, CD24, CD27, CD28, CD30, CD38, CD39, CD40, CD40L, CD47, CD52, CD70, CD80, CD86, CD123, CD133, CD137, CD137L, CD160, CD272, CEACAM5, CLEC9, CLEC91, CRTH2, CSF-1, CSF-2, CSF-3, CXCL1, CXCL2, CXCL4, CXCL12, CXCL13, CXCR3, cMet, CTLA4, DLL3, DLL4, DNGR-1, E-cadherin, EGFR, ENTPD1, EpCAM, FCER1, FCER1A, FCER2, FGFR, FLAP, FOLH1, Gi24, GITR, GITRL, GPR5, GP100, GPRC5D, HER2, HER3, ICOSL, ICOS, HHLA2, HMGB1, HVEM, IDO, IFNa, IgE, IGF1R, IL2Rbeta, IL1, ILIA, IL1B, IL1F10, IL2, IL4, IL4Ra, IL5, IL5R, IL6, IL7, IL7Ra, IL8, IL9, IL9R, IL10, rhIL1O, IL12, IL13, IL13Ra1, IL13Ra2, IL15, IL17, IL17Rb, IL18, IL22, IL23, IL25, IL7, IL33, IL35, ITGB4, ITK, KIR, LAG3, LAMP1, leptin, LPFS2, MHC class II, MUC-1, MUC-16, NCR3LG1, NKG2D, NKp46, NTPDase-1, OX40, OX40L, PD-1, PD-L1, PD-L2, PROM1, S152, SIRPalpha, SISP1, SLC, SPG64, ST2, STEAP1, STEAP2, Syk kinase, STEAP1, TROP2, TACI, TDO, TGFBETA, T14, TIGIT, TIM3, TLR, TLR2, TLR4, TLR5, TLR9, TMEF1, TNFa, TNFRSF7, Tp55, TREM1, TSLP, TSLPR, TWEAK, VEGF, VISTA, Vstm3, or WUCAM. In other aspects, the invention is directed to an antigen binding polypeptide or antigen binding polypeptide complex comprising a polypeptide having the structure represented by VH1-L1-VH2-L2-VL2-L3-VL1-L4-CH3, wherein VL1, VL2, VH1 and/or VH2 specifically binds to A2AR, APRIL, ATPDase, BAFF, BAFFR, BCMA, BlyS, BTK, BTLA, B7DC, B7H1, B7H2, B7H3, B7H4, B7H5, B7H6, B7H7, B7RP1, B7-4, C3, C5, CCL2, CCL3, CCL4, CCL5, CCL7, CCL8, CCL11, CCL15, CCL17, CCL19, CCL20, CCL21, CCL25 CCR3, CCR4, CD3, CD16A, CD19, CD20, CD24, CD27, CD28, CD30, CD38, CD39, CD40, CD40L, CD47, CD52, CD70, CD80, CD86, CD123, CD133, CD137, CD137L, CD160, CD272, CEACAM5, CLEC9, CLEC91, CRTH2, CSF-1, CSF-2, CSF-3, CXCL1, CXCL2, CXCL4, CXCL12, CXCL13, CXCR3, cMet, CTLA4, DLL3, DLL4, DNGR-1, E-cadherin, EGFR, ENTPD1, EpCAM, FCER1, FCER1A, FCER2, FGFR, FLAP, FOLH1, Gi24, GITR, GITRL, GPR5, GP100, GPRC5D, HER2, HER3, ICOSL, ICOS, HHLA2, HMGB1, HVEM, IDO, IFNa, IgE, IGF1R, IL2Rbeta, IL1, ILIA, IL1B, IL1F10, IL2, IL4, IL4Ra, IL5, IL5R, IL6, IL7, IL7Ra, IL8, IL9, IL9R, IL10, rhIL1O, IL12, IL13, IL13Ra1, IL13Ra2, IL15, IL17, IL17Rb, IL18, IL22, IL23, IL25, IL7, IL33, IL35, ITGB4, ITK, KIR, LAG3, LAMP1, leptin, LPFS2, MHC class II, MUC-1, MUC-16, NCR3LG1, NKG2D, NKp46, NTPDase-1, OX40, OX40L, PD-1, PD-L1, PD-L2, PROM1, S152, SIRPalpha, SISP1, SLC, SPG64, ST2, STEAP1, STEAP2, Syk kinase, STEAP1, TROP2, TACI, TDO, TGFBETA, T14, TIGIT, TIM3, TLR, TLR2, TLR4, TLR5, TLR9, TMEF1, TNFa, TNFRSF7, Tp55, TREM1, TSLP, TSLPR, TWEAK, VEGF, VISTA, Vstm3, or WUCAM. In other aspects, the invention is directed to an antigen binding polypeptide or antigen binding polypeptide complex comprising a polypeptide having the structure represented by VL1-VL2-VH2-VH1-CH3-CH3, wherein VL1, VL2, VH1 and/or VH2 specifically binds to A2AR, APRIL, ATPDase, BAFF, BAFFR, BCMA, BlyS, BTK, BTLA, B7DC, B7H1, B7H2, B7H3, B7H4, B7H5, B7H6, B7H7, B7RP1, B7-4, C3, C5, CCL2, CCL3, CCL4, CCL5, CCL7, CCL8, CCL11, CCL15, CCL17, CCL19, CCL20, CCL21, CCL25 CCR3, CCR4, CD3, CD16A, CD19, CD20, CD24, CD27, CD28, CD30, CD38, CD39, CD40, CD40L, CD47, CD52, CD70, CD80, CD86, CD123, CD133, CD137, CD137L, CD160, CD272, CEACAM5, CLEC9, CLEC91, CRTH2, CSF-1, CSF-2, CSF-3, CXCL1, CXCL2, CXCL4, CXCL12, CXCL13, CXCR3, cMet, CTLA4, DLL3, DLL4, DNGR-1, E-cadherin, EGFR, ENTPD1, EpCAM, FCER1, FCER1A, FCER2, FGFR, FLAP, FOLH1, Gi24, GITR, GITRL, GPR5, GP100, GPRC5D, HER2, HER3, ICOSL, ICOS, HHLA2, HMGB1, HVEM, IDO, IFNa, IgE, IGF1R, IL2Rbeta, IL1, ILIA, IL1B, IL1F10, IL2, IL4, IL4Ra, IL5, IL5R, IL6, IL7, IL7Ra, IL8, IL9, IL9R, IL10, rhIL1O, IL12, IL13, IL13Ra1, IL13Ra2, IL15, IL17, IL17Rb, IL18, IL22, IL23, IL25, IL7, IL33, IL35, ITGB4, ITK, KIR, LAG3, LAMP1, leptin, LPFS2, MHC class II, MUC-1, MUC-16, NCR3LG1, NKG2D, NKp46, NTPDase-1, OX40, OX40L, PD-1, PD-L1, PD-L2, PROM1, S152, SIRPalpha, SISP1, SLC, SPG64, ST2, STEAP1, STEAP2, Syk kinase, STEAP1, TROP2, TACI, TDO, TGFBETA, T14, TIGIT, TIM3, TLR, TLR2, TLR4, TLR5, TLR9, TMEF1, TNFa, TNFRSF7, Tp55, TREM1, TSLP, TSLPR, TWEAK, VEGF, VISTA, Vstm3, or WUCAM. In other aspects, the invention is directed to an antigen binding polypeptide or antigen binding polypeptide complex comprising a polypeptide having the structure represented by VH1-VH2-VL2-VL1-CH3-CH3, wherein VL1, VL2, VH1 and/or VH2 specifically binds to A2AR, APRIL, ATPDase, BAFF, BAFFR, BCMA, BlyS, BTK, BTLA, B7DC, B7H1, B7H2, B7H3, B7H4, B7H5, B7H6, B7H7, B7RP1, B7-4, C3, C5, CCL2, CCL3, CCL4, CCL5, CCL7, CCL8, CCL11, CCL15, CCL17, CCL19, CCL20, CCL21, CCL25 CCR3, CCR4, CD3, CD16A, CD19, CD20, CD24, CD27, CD28, CD30, CD38, CD39, CD40, CD40L, CD47, CD52, CD70, CD80, CD86, CD123, CD133, CD137, CD137L, CD160, CD272, CEACAM5, CLEC9, CLEC91, CRTH2, CSF-1, CSF-2, CSF-3, CXCL1, CXCL2, CXCL4, CXCL12, CXCL13, CXCR3, cMet, CTLA4, DLL3, DLL4, DNGR-1, E-cadherin, EGFR, ENTPD1, EpCAM, FCER1, FCER1A, FCER2, FGFR, FLAP, FOLH1, Gi24, GITR, GITRL, GPR5, GP100, GPRC5D, HER2, HER3, ICOSL, ICOS, HHLA2, HMGB1, HVEM, IDO, IFNa, IgE, IGF1R, IL2Rbeta, IL1, ILIA, IL1B, IL1F10, IL2, IL4, IL4Ra, IL5, IL5R, IL6, IL7, IL7Ra, IL8, IL9, IL9R, IL10, rhIL1O, IL12, IL13, IL13Ra1, IL13Ra2, IL15, IL17, IL17Rb, IL18, IL22, IL23, IL25, IL7, IL33, IL35, ITGB4, ITK, KIR, LAG3, LAMP1, leptin, LPFS2, MHC class II, MUC-1, MUC-16, NCR3LG1, NKG2D, NKp46, NTPDase-1, OX40, OX40L, PD-1, PD-L1, PD-L2, PROM1, S152, SIRPalpha, SISP1, SLC, SPG64, ST2, STEAP1, STEAP2, Syk kinase, STEAP1, TROP2, TACI, TDO, TGFBETA, T14, TIGIT, TIM3, TLR, TLR2, TLR4, TLR5, TLR9, TMEF1, TNFa, TNFRSF7, Tp55, TREM1, TSLP, TSLPR, TWEAK, VEGF, VISTA, Vstm3, or WUCAM. In other aspects, the invention is directed to an antigen binding polypeptide or antigen binding polypeptide complex comprising a polypeptide having the structure represented by VL1-L1-VL2-L2-VH2-L3-VH1-CH3-CH3, wherein VL1, VL2, VH1 and/or VH2 specifically binds to A2AR, APRIL, ATPDase, BAFF, BAFFR, BCMA, BlyS, BTK, BTLA, B7DC, B7H1, B7H2, B7H3, B7H4, B7H5, B7H6, B7H7, B7RP1, B7-4, C3, C5, CCL2, CCL3, CCL4, CCL5, CCL7, CCL8, CCL11, CCL15, CCL17, CCL19, CCL20, CCL21, CCL25 CCR3, CCR4, CD3, CD16A, CD19, CD20, CD24, CD27, CD28, CD30, CD38, CD39, CD40, CD40L, CD47, CD52, CD70, CD80, CD86, CD123, CD133, CD137, CD137L, CD160, CD272, CEACAM5, CLEC9, CLEC91, CRTH2, CSF-1, CSF-2, CSF-3, CXCL1, CXCL2, CXCL4, CXCL12, CXCL13, CXCR3, cMet, CTLA4, DLL3, DLL4, DNGR-1, E-cadherin, EGFR, ENTPD1, EpCAM, FCER1, FCER1A, FCER2, FGFR, FLAP, FOLH1, Gi24, GITR, GITRL, GPR5, GP100, GPRC5D, HER2, HER3, ICOSL, ICOS, HHLA2, HMGB1, HVEM, IDO, IFNa, IgE, IGF1R, IL2Rbeta, IL1, ILIA, IL1B, IL1F10, IL2, IL4, IL4Ra, IL5, IL5R, IL6, IL7, IL7Ra, IL8, IL9, IL9R, IL10, rhIL1O, IL12, IL13, IL13Ra1, IL13Ra2, IL15, IL17, IL17Rb, IL18, IL22, IL23, IL25, IL7, IL33, IL35, ITGB4, ITK, KIR, LAG3, LAMP1, leptin, LPFS2, MHC class II, MUC-1, MUC-16, NCR3LG1, NKG2D, NKp46, NTPDase-1, OX40, OX40L, PD-1, PD-L1, PD-L2, PROM1, S152, SIRPalpha, SISP1, SLC, SPG64, ST2, STEAP1, STEAP2, Syk kinase, STEAP1, TROP2, TACI, TDO, TGFBETA, T14, TIGIT, TIM3, TLR, TLR2, TLR4, TLR5, TLR9, TMEF1, TNFa, TNFRSF7, Tp55, TREM1, TSLP, TSLPR, TWEAK, VEGF, VISTA, Vstm3, or WUCAM. In other aspects, the invention is directed to an antigen binding polypeptide or antigen binding polypeptide complex comprising a polypeptide having the structure represented by VH1-L1-VH2-L2-VL2-L3-VL1-CH3-CH3, wherein VL1, VL2, VH1 and/or VH2 specifically binds to A2AR, APRIL, ATPDase, BAFF, BAFFR, BCMA, BlyS, BTK, BTLA, B7DC, B7H1, B7H2, B7H3, B7H4, B7H5, B7H6, B7H7, B7RP1, B7-4, C3, C5, CCL2, CCL3, CCL4, CCLS, CCL7, CCL8, CCL11, CCL15, CCL17, CCL19, CCL20, CCL21, CCL25 CCR3, CCR4, CD3, CD16A, CD19, CD20, CD24, CD27, CD28, CD30, CD38, CD39, CD40, CD40L, CD47, CD52, CD70, CD80, CD86, CD123, CD133, CD137, CD137L, CD160, CD272, CEACAM5, CLEC9, CLEC91, CRTH2, CSF-1, CSF-2, CSF-3, CXCL1, CXCL2, CXCL4, CXCL12, CXCL13, CXCR3, cMet, CTLA4, DLL3, DLL4, DNGR-1, E-cadherin, EGFR, ENTPD1, EpCAM, FCER1, FCER1A, FCER2, FGFR, FLAP, FOLH1, Gi24, GITR, GITRL, GPR5, GP100, GPRC5D, HER2, HER3, ICOSL, ICOS, HHLA2, HMGB1, HVEM, IDO, IFNa, IgE, IGF1R, IL2Rbeta, IL1, ILIA, IL1B, IL1F10, IL2, IL4, IL4Ra, IL5, IL5R, IL6, IL7, IL7Ra, IL8, IL9, IL9R, IL10, rhIL1O, IL12, IL13, IL13Ra1, IL13Ra2, IL15, IL17, IL17Rb, IL18, IL22, IL23, IL25, IL7, IL33, IL35, ITGB4, ITK, KIR, LAG3, LAMP1, leptin, LPFS2, MHC class II, MUC-1, MUC-16, NCR3LG1, NKG2D, NKp46, NTPDase-1, OX40, OX40L, PD-1, PD-L1, PD-L2, PROM1, S152, SIRPalpha, SISP1, SLC, SPG64, ST2, STEAP1, STEAP2, Syk kinase, STEAP1, TROP2, TACI, TDO, TGFBETA, T14, TIGIT, TIM3, TLR, TLR2, TLR4, TLR5, TLR9, TMEF1, TNFa, TNFRSF7, Tp55, TREM1, TSLP, TSLPR, TWEAK, VEGF, VISTA, Vstm3, or WUCAM. In other aspects, the invention is directed to an antigen binding polypeptide or antigen binding polypeptide complex comprising a polypeptide having the structure represented by VL1-L1-VL2-L2-VH2-L3-VH1-L4-CH3-CH3, wherein VL1, VL2, VH1 and/or VH2 specifically binds to A2AR, APRIL, ATPDase, BAFF, BAFFR, BCMA, BlyS, BTK, BTLA, B7DC, B7H1, B7H2, B7H3, B7H4, B7H5, B7H6, B7H7, B7RP1, B7-4, C3, C5, CCL2, CCL3, CCL4, CCLS, CCL7, CCL8, CCL11, CCL15, CCL17, CCL19, CCL20, CCL21, CCL25 CCR3, CCR4, CD3, CD16A, CD19, CD20, CD24, CD27, CD28, CD30, CD38, CD39, CD40, CD40L, CD47, CD52, CD70, CD80, CD86, CD123, CD133, CD137, CD137L, CD160, CD272, CEACAM5, CLEC9, CLEC91, CRTH2, CSF-1, CSF-2, CSF-3, CXCL1, CXCL2, CXCL4, CXCL12, CXCL13, CXCR3, cMet, CTLA4, DLL3, DLL4, DNGR-1, E-cadherin, EGFR, ENTPD1, EpCAM, FCER1, FCER1A, FCER2, FGFR, FLAP, FOLH1, Gi24, GITR, GITRL, GPR5, GP100, GPRC5D, HER2, HER3, ICOSL, ICOS, HHLA2, HMGB1, HVEM, IDO, IFNa, IgE, IGF1R, IL2Rbeta, IL1, ILIA, IL1B, IL1F10, IL2, IL4, IL4Ra, IL5, IL5R, IL6, IL7, IL7Ra, IL8, IL9, IL9R, IL10, rhIL1O, IL12, IL13, IL13Ra1, IL13Ra2, IL15, IL17, IL17Rb, IL18, IL22, IL23, IL25, IL7, IL33, IL35, ITGB4, ITK, KIR, LAG3, LAMP1, leptin, LPFS2, MHC class II, MUC-1, MUC-16, NCR3LG1, NKG2D, NKp46, NTPDase-1, OX40, OX40L, PD-1, PD-L1, PD-L2, PROM1, S152, SIRPalpha, SISP1, SLC, SPG64, ST2, STEAP1, STEAP2, Syk kinase, STEAP1, TROP2, TACI, TDO, TGFBETA, T14, TIGIT, TIM3, TLR, TLR2, TLR4, TLR5, TLR9, TMEF1, TNFa, TNFRSF7, Tp55, TREM1, TSLP, TSLPR, TWEAK, VEGF, VISTA, Vstm3, or WUCAM. In other aspects, the invention is directed to an antigen binding polypeptide or antigen binding polypeptide complex comprising a polypeptide having the structure represented by VH1-L1-VH2-L2-VL2-L3-VL1-L4-CH3-CH3, wherein VL1, VL2, VH1 and/or VH2 specifically binds to A2AR, APRIL, ATPDase, BAFF, BAFFR, BCMA, BlyS, BTK, BTLA, B7DC, B7H1, B7H2, B7H3, B7H4, B7H5, B7H6, B7H7, B7RP1, B7-4, C3, C5, CCL2, CCL3, CCL4, CCLS, CCL7, CCL8, CCL11, CCL15, CCL17, CCL19, CCL20, CCL21, CCL25 CCR3, CCR4, CD3, CD16A, CD19, CD20, CD24, CD27, CD28, CD30, CD38, CD39, CD40, CD40L, CD47, CD52, CD70, CD80, CD86, CD123, CD133, CD137, CD137L, CD160, CD272, CEACAM5, CLEC9, CLEC91, CRTH2, CSF-1, CSF-2, CSF-3, CXCL1, CXCL2, CXCL4, CXCL12, CXCL13, CXCR3, cMet, CTLA4, DLL3, DLL4, DNGR-1, E-cadherin, EGFR, ENTPD1, EpCAM, FCER1, FCER1A, FCER2, FGFR, FLAP, FOLH1, Gi24, GITR, GITRL, GPRS, GP100, GPRC5D, HER2, HER3, ICOSL, ICOS, HHLA2, HMGB1, HVEM, IDO, IFNa, IgE, IGF1R, IL2Rbeta, IL1, ILIA, IL1B, IL1F10, IL2, IL4, IL4Ra, IL5, IL5R, IL6, IL7, IL7Ra, IL8, IL9, IL9R, IL10, rhIL1O, IL12, IL13, IL13Ra1, IL13Ra2, IL15, IL17, IL17Rb, IL18, IL22, IL23, IL25, IL7, IL33, IL35, ITGB4, ITK, KIR, LAG3, LAMP1, leptin, LPFS2, MHC class II, MUC-1, MUC-16, NCR3LG1, NKG2D, NKp46, NTPDase-1, OX40, OX40L, PD-1, PD-L1, PD-L2, PROM1, S152, SIRPalpha, SISP1, SLC, SPG64, ST2, STEAP1, STEAP2, Syk kinase, STEAP1, TROP2, TACI, TDO, TGFBETA, T14, TIGIT, TIM3, TLR, TLR2, TLR4, TLR5, TLR9, TMEF1, TNFa, TNFRSF7, Tp55, TREM1, TSLP, TSLPR, TWEAK, VEGF, VISTA, Vstm3, or WUCAM. In other aspects, the invention is directed to an antigen binding polypeptide or antigen binding polypeptide complex comprising a polypeptide having the structure represented by VL1-L1-VL2-L2-VH2-L3-VH1-L4-CH3-L5-CH3, wherein VL1, VL2, VH1 and/or VH2 specifically binds to A2AR, APRIL, ATPDase, BAFF, BAFFR, BCMA, BlyS, BTK, BTLA, B7DC, B7H1, B7H2, B7H3, B7H4, B7H5, B7H6, B7H7, B7RP1, B7-4, C3, C5, CCL2, CCL3, CCL4, CCLS, CCL7, CCL8, CCL11, CCL15, CCL17, CCL19, CCL20, CCL21, CCL25 CCR3, CCR4, CD3, CD16A, CD19, CD20, CD24, CD27, CD28, CD30, CD38, CD39, CD40, CD40L, CD47, CD52, CD70, CD80, CD86, CD123, CD133, CD137, CD137L, CD160, CD272, CEACAM5, CLEC9, CLEC91, CRTH2, CSF-1, CSF-2, CSF-3, CXCL1, CXCL2, CXCL4, CXCL12, CXCL13, CXCR3, cMet, CTLA4, DLL3, DLL4, DNGR-1, E-cadherin, EGFR, ENTPD1, EpCAM, FCER1, FCER1A, FCER2, FGFR, FLAP, FOLH1, Gi24, GITR, GITRL, GPRS, GP100, GPRC5D, HER2, HER3, ICOSL, ICOS, HHLA2, HMGB1, HVEM, IDO, IFNa, IgE, IGF1R, IL2Rbeta, IL1, ILIA, IL1B, IL1F10, IL2, IL4, IL4Ra, IL5, IL5R, IL6, IL7, IL7Ra, IL8, IL9, IL9R, IL10, rhIL1O, IL12, IL13, IL13Ra1, IL13Ra2, IL15, IL17, IL17Rb, IL18, IL22, IL23, IL25, IL7, IL33, IL35, ITGB4, ITK, KIR, LAG3, LAMP1, leptin, LPFS2, MHC class II, MUC-1, MUC-16, NCR3LG1, NKG2D, NKp46, NTPDase-1, OX40, OX40L, PD-1, PD-L1, PD-L2, PROM1, S152, SIRPalpha, SISP1, SLC, SPG64, ST2, STEAP1, STEAP2, Syk kinase, STEAP1, TROP2, TACI, TDO, TGFBETA, T14, TIGIT, TIM3, TLR, TLR2, TLR4, TLR5, TLR9, TMEF1, TNFa, TNFRSF7, Tp55, TREM1, TSLP, TSLPR, TWEAK, VEGF, VISTA, Vstm3, or WUCAM. In other aspects, the invention is directed to an antigen binding polypeptide or antigen binding polypeptide complex comprising a polypeptide having the structure represented by VH1-L1-VH2-L2-VL2-L3-VL1-L4-CH3-L5-CH3, wherein VL1, VL2, VH1 and/or VH2 specifically binds to A2AR, APRIL, ATPDase, BAFF, BAFFR, BCMA, BlyS, BTK, BTLA, B7DC, B7H1, B7H2, B7H3, B7H4, B7H5, B7H6, B7H7, B7RP1, B7-4, C3, C5, CCL2, CCL3, CCL4, CCL5, CCL7, CCL8, CCL11, CCL15, CCL17, CCL19, CCL20, CCL21, CCL25 CCR3, CCR4, CD3, CD16A, CD19, CD20, CD24, CD27, CD28, CD30, CD38, CD39, CD40, CD40L, CD47, CD52, CD70, CD80, CD86, CD123, CD133, CD137, CD137L, CD160, CD272, CEACAM5, CLEC9, CLEC91, CRTH2, CSF-1, CSF-2, CSF-3, CXCL1, CXCL2, CXCL4, CXCL12, CXCL13, CXCR3, cMet, CTLA4, DLL3, DLL4, DNGR-1, E-cadherin, EGFR, ENTPD1, EpCAM, FCER1, FCER1A, FCER2, FGFR, FLAP, FOLH1, Gi24, GITR, GITRL, GPR5, GP100, GPRC5D, HER2, HER3, ICOSL, ICOS, HHLA2, HMGB1, HVEM, IDO, IFNa, IgE, IGF1R, IL2Rbeta, IL1, ILIA, IL1B, IL1F10, IL2, IL4, IL4Ra, IL5, IL5R, IL6, IL7, IL7Ra, IL8, IL9, IL9R, IL10, rhIL1O, IL12, IL13, IL13Ra1, IL13Ra2, IL15, IL17, IL17Rb, IL18, IL22, IL23, IL25, IL7, IL33, IL35, ITGB4, ITK, KIR, LAG3, LAMP1, leptin, LPFS2, MHC class II, MUC-1, MUC-16, NCR3LG1, NKG2D, NKp46, NTPDase-1, OX40, OX40L, PD-1, PD-L1, PD-L2, PROM1, S152, SIRPalpha, SISP1, SLC, SPG64, ST2, STEAP1, STEAP2, Syk kinase, STEAP1, TROP2, TACI, TDO, TGFBETA, T14, TIGIT, TIM3, TLR, TLR2, TLR4, TLR5, TLR9, TMEF1, TNFa, TNFRSF7, Tp55, TREM1, TSLP, TSLPR, TWEAK, VEGF, VISTA, Vstm3, or WUCAM.

[0165] All the disclosures relating to the antigen binding polypeptide structures described herein and the antigen binding polypeptide complex structures described herein apply to and can be combined with all the VH and VL regions described herein including all the target antigens described herein and all the VH and VL sequences and CDR sequences described herein.

[0166] In some aspects, the VH1 and VL1 of the antigen binding polypeptide or antigen binding polypeptide complex specifically bind to human CD28, and VH2 and VL2 specifically bind to human CD3. In another aspect, the VH1 and VL1 of the antigen binding polypeptide or antigen binding polypeptide complex specifically bind to human CD3, and VH2 and VL2 specifically bind to human CD28.

[0167] In some aspects, the VH1 and VL1 of the antigen binding polypeptide or antigen binding polypeptide complex specifically bind to human CD19, and VH2 and VL2 specifically bind to human CD38. In another aspect, the VH1 and VL1 of the antigen binding polypeptide or antigen binding polypeptide complex specifically bind to human CD38, and VH2 and VL2 specifically bind to human CD19.

[0168] In some aspects, the VH1 and VL1 of the antigen binding polypeptide or antigen binding polypeptide complex specifically bind to human CD3, and VH2 and VL2 specifically bind to human CD19. In another aspect, the VH1 and VL1 of the antigen binding polypeptide or antigen binding polypeptide complex specifically bind to human CD19, and VH2 and VL2 specifically bind to human CD3.

[0169] In some aspects, the VH1 and VL1 of the antigen binding polypeptide or antigen binding polypeptide complex specifically bind to human CD3, and VH2 and VL2 specifically bind to human CD38. In another aspect, the VH1 and VL1 of the antigen binding polypeptide or antigen binding polypeptide complex specifically bind to human CD38, and VH2 and VL2 specifically bind to human CD3.

[0170] In some aspects, the VH1 and VL1 of the antigen binding polypeptide or antigen binding polypeptide complex specifically bind to human CD19, and VH2 and VL2 specifically bind to human CD28. In another aspect, the VH1 and VL1 of the antigen binding polypeptide or antigen binding polypeptide complex specifically bind to human CD28, and VH2 and VL2 specifically bind to human CD19.

[0171] In some aspects, the VH1 and VL1 of the antigen binding polypeptide or antigen binding polypeptide complex specifically bind to human CD28, and VH2 and VL2 specifically bind to human CD38. In another aspect, the VH1 and VL1 of the antigen binding polypeptide or antigen binding polypeptide complex specifically bind to human CD38, and VH2 and VL2 specifically bind to human CD28.

[0172] In some aspects, the VH1 and VL1 of the antigen binding polypeptide or antigen binding polypeptide complex specifically bind to human CD3, and VH2 and VL2 specifically bind to human Her2. In another aspect, the VH1 and VL1 of the antigen binding polypeptide or antigen binding polypeptide complex specifically bind to human Her2, and VH2 and VL2 specifically bind to human CD3.

[0173] In some aspects, the VH1 and VL1 of the antigen binding polypeptide or antigen binding polypeptide complex specifically bind to human CD19, and VH2 and VL2 specifically bind to human CD20. In some aspects, the VH1 and VL1 of the antigen binding polypeptide or antigen binding polypeptide complex specifically bind to human CD20, and VH2 and VL2 specifically bind to human CD19.

[0174] In some aspects, the VH1 and VL1 of the antigen binding polypeptide or antigen binding polypeptide complex specifically bind to human Trop2, and VH2 and VL2 specifically bind to human cMet. In some aspects, the VH1 and VL1 of the antigen binding polypeptide or antigen binding polypeptide complex specifically bind to human cMet, and VH2 and VL2 specifically bind to human Trop2.

[0175] Antigen binding sequences (e.g., CDR, VH, VL, heavy chain and light chain sequences from antibodies) for A2AR, APRIL, ATPDase, BAFF, BAFFR, BCMA, BlyS, BTK, BTLA, B7DC, B7H1, B7H2, B7H3, B7H4, B7H5, B7H6, B7H7, B7RP1, B7-4, C3, C5, CCL2, CCL3, CCL4, CCL5, CCL7, CCL8, CCL11, CCL15, CCL17, CCL19, CCL20, CCL21, CCL25 CCR3, CCR4, CD3, CD16A, CD19, CD20, CD24, CD27, CD28, CD30, CD38, CD39, CD40, CD40L, CD47, CD52, CD70, CD80, CD86, CD123, CD133, CD137, CD137L, CD160, CD272, CEACAM5, CLEC9, CLEC91, CRTH2, CSF-1, CSF-2, CSF-3, CXCL1, CXCL2, CXCL4, CXCL12, CXCL13, CXCR3, cMet, CTLA4, DLL3, DLL4, DNGR-1, E-cadherin, EGFR, ENTPD1, EpCAM, FCER1, FCER1A, FCER2, FGFR, FLAP, FOLH1, Gi24, GITR, GITRL, GPR5, GP100, GPRC5D, HER2, HER3, ICOSL, ICOS, HHLA2, HMGB1, HVEM, IDO, IFNa, IgE, IGF1R, IL2Rbeta, IL1, ILIA, IL1B, IL1F10, IL2, IL4, IL4Ra, IL5, IL5R, IL6, IL7, IL7Ra, IL8, IL9, IL9R, IL10, rhIL1O, IL12, IL13, IL13Ra1, IL13Ra2, IL15, IL17, IL17Rb, IL18, IL22, IL23, IL25, IL7, IL33, IL35, ITGB4, ITK, KIR, LAG3, LAMP1, leptin, LPFS2, MHC class II, MUC-1, MUC-16, NCR3LG1, NKG2D, NKp46, NTPDase-1, OX40, OX40L, PD-1, PD-L1, PD-L2, PROM1, S152, SIRPalpha, SISP1, SLC, SPG64, ST2, STEAP1, STEAP2, Syk kinase, STEAP1, TROP2, TACI, TDO, TGFBETA, T14, TIGIT, TIM3, TLR, TLR2, TLR4, TLR5, TLR9, TMEF1, TNFa, TNFRSF7, Tp55, TREM1, TSLP, TSLPR, TWEAK, VEGF, VISTA, Vstm3, and WUCAM are well known. Such sequences include, but are not limited to, GenBank Accession Nos. AAA39272.1, AAA39159.1, ABN79462.1, AVW80143.1, AVW80142.1, AVW80141.1, AAB34430.1, AAB34429.1, CAD45042.1, 4CMH_C and 4CMH_B, and UniProt Identifiers P04626-1, P04626-2, P04626-3, P04626-4, P04626-4, P04626-5 and P-04626-6. Such sequences are also described, for example, in Wernly et al., Cells, 9(2):295, 2020; Arakawa et al., Journal of Biochemistry, 120(3):657-662, 1996; Cole et al., Transplantation, 68(4):563-571, 1999; L1 et al., International Immunopharmacology, 62:299-308, 2018; Castella et al., Methods & Clinical Development, 12:134-144, 2019; Sun et al., Molecular Immunology, 41(9):929-938, 2004; Iwaszkiewicz-Grzes et al., Cytotherapy, 22(11):629-641, 2020, Rosinski et al., Transplant Direct, 1(2):e7, 2015; Ellis et al., J Immunology, 155(2):925-937, 1995; Stevenson et al., Blood, 77(5):1071-1079, 1991; Chillemi et al., Molecular Medicine, 19:99-108, 2013, and Int'l Pub. No. WO 2020/076853.

[0176] In addition, molecular biology and recombinant DNA methods for making, screening and engineering antigen binding complexes and antibodies containing such sequences are well known and described, for example, in Adair et al. Human Antibodies, 5(1-2):41-47, 1994; Kostelny et al., J Immunol, 148(5):1547-1553 (1992), Shiraiwa et al., Methods, 154:10-20, 2019; and Zola, “Monoclonal Antibodies: A Manual of Techniques,” 1987, 1^{st} Ed., CRC Press; and Steinitz, Human Antibodies, 18(1-2):1-10, 2009.

[0177] In some aspects, VH1 of the antigen binding polypeptide or antigen binding polypeptide complex comprises an amino acid sequence having at least 90% identity, at least 95% identity, or 100% identity to any one of SEQ ID NOs:20-25 and 122; VH2 comprises an amino acid sequence having at least 90% identity, at least 95% identity, or 100% identity to any one of SEQ ID NOs:20-25 and 122; VL1 comprises an amino acid sequence having at least 90% identity, at least 95% identity, or 100% identity to any one of SEQ ID NOs:26-31 and 123; and/or VL2 comprises an amino acid sequence having at least 90% identity, at least 95% identity, or 100% identity to any one of SEQ ID NOs:26-31 and 123. For example, the VH1 may comprise an amino acid sequence having at least 90% identity to any one of SEQ ID NOs:20-25 and 122; VH2 may comprise an amino acid sequence having at least 90% identity to any one of SEQ ID NOs:20-25 and 122; VL1 may comprise an amino acid sequence having at least 90% identity to any one of SEQ ID NOs:26-31 and 123; and/or VL2 may comprise an amino acid sequence having at least 90% identity to any one of SEQ ID NOs:26-31 and 123. At least 90% identity may include at least 91%, 92%, 93%, 94%, 95%, 96%, 97%, 98%, 99% or 100% identity to the reference polypeptide sequence. For example, the VH1 may comprise the amino acid sequence of any one of SEQ ID NOs:20-25 and 122; VH2 may comprise the amino acid sequence of any one of SEQ ID NOs:20-25 and 122; VL1 may comprise the amino acid sequence of any one of SEQ ID NOs:26-31 and 123; and/or VL2 may comprise the amino acid sequence of any one of SEQ ID NOs:26-31 and 123.

[0178] In some aspects, VH1 comprises a CDR1 comprising SEQ ID NO:98 or a sequence having at least 90% identity or at least 95% identity to SEQ ID NO:98; a CDR2 comprising SEQ ID NO:99 or a sequence having at least 90% identity or at least 95% identity to SEQ ID NO:99; and a CDR3 comprising SEQ ID NO:100 or a sequence having at least 90% identity or at least 95% identity to SEQ ID NO:100; and VL1 comprises a CDR1 comprising SEQ ID NO:101 or a sequence having at least 90% identity or at least 95% identity to SEQ ID NO:101, a CDR2 comprising SEQ ID NO:102 or a sequence having at least 90% identity or 95% identity to SEQ ID NO:102, and a CDR3 comprising SEQ ID NO:103 or a sequence having at least 90% identity or at least 95% identity to SEQ ID NO:103. For example, the VH1 may comprise a CDR1 comprising a sequence having at least 90% identity to SEQ ID NO: 98, a CDR2 comprising a sequence having at least 90% identity to SEQ ID NO: 99, and a CDR3 comprising a sequence having at least 90% identity to SEQ ID NO: 100; and the VL1 may comprise a CDR1 comprising a sequence having at least 90% identity to SEQ ID NO: 101, a CDR2 comprising a sequence having at least 90% identity to SEQ ID NO: 102 and a CDR3 comprising a sequence having at least 90% identity to SEQ ID NO: 103. At least 90% identity may include at least 91%, 92%, 93%, 94%, 95%, 96%, 97%, 98%, 99% or 100% identity to the reference polypeptide sequence. For example, the VH1 may comprise a CDR1 comprising SEQ ID NO: 98, a CDR2 comprising SEQ ID NO: 99, and a CDR3 comprising SEQ ID NO: 100; and the VL1 may comprise a CDR1 comprising SEQ ID NO: 101, a CDR2 comprising SEQ ID NO: 102 and a CDR3 comprising SEQ ID NO: 103.

[0179] In some aspects, VH2 comprises a CDR1 comprising SEQ ID NO:98 or a sequence having at least 90% or at least 95% identity to SEQ ID NO:98; a CDR2 comprising SEQ ID NO:99 or a sequence having at least 90% identity or at least 95% identity to SEQ ID NO:99; and a CDR3 comprising SEQ ID NO:100 or a sequence having at least 90% identity or at least 95% identity to SEQ ID NO:100; and VL2 comprises a CDR1 comprising SEQ ID NO:101 or a sequence having at least 90% identity or at least 95% identity to SEQ ID NO:101, a CDR2 comprising SEQ ID NO:102 or a sequence having at least 90% identity or 95% identity to SEQ ID NO:102, and a CDR3 comprising SEQ ID NO:103 or a sequence having at least 90% identity or at least 95% identity to SEQ ID NO:103. For example, the VH2 may comprise a CDR1 comprising a sequence having at least 90% identity to SEQ ID NO: 98, a CDR2 comprising a sequence having at least 90% identity to SEQ ID NO: 99, and a CDR3 comprising a sequence having at least 90% identity to SEQ ID NO: 100; and the VL2 may comprise a CDR1 comprising a sequence having at least 90% identity to SEQ ID NO: 101, a CDR2 comprising a sequence having at least 90% identity to SEQ ID NO: 102 and a CDR3 comprising a sequence having at least 90% identity to SEQ ID NO: 103. At least 90% identity may include at least 91%, 92%, 93%, 94%, 95%, 96%, 97%, 98%, 99% or 100% identity to the reference polypeptide sequence. For example, the VH2 may comprise a CDR1 comprising SEQ ID NO: 98, a CDR2 comprising SEQ ID NO: 99, and a CDR3 comprising SEQ ID NO: 100; and the VL2 may comprise a CDR1 comprising SEQ ID NO: 101, a CDR2 comprising SEQ ID NO: 102 and a CDR3 comprising SEQ ID NO: 103.

[0180] In some aspects, VH1 comprises a CDR1 comprising SEQ ID NO:104 or a sequence having at least 90% identity or at least 95% identity to SEQ ID NO:104; a CDR2 comprising SEQ ID NO:105 or a sequence having at least 90% identity or at least 95% identity to SEQ ID NO:105; and a CDR3 comprising SEQ ID NO:106 or a sequence having at least 90% identity or at least 95% identity to SEQ ID NO:106; and VL1 comprises a CDR1 comprising SEQ ID NO:107 or a sequence having at least 90% identity or at least 95% identity to SEQ ID NO:107, a CDR2 comprising SEQ ID NO:108 or a sequence having at least 90% identity or 95% identity to SEQ ID NO:108, and a CDR3 comprising SEQ ID NO:109 or a sequence having at least 90% identity or at least 95% identity to SEQ ID NO:109. For example, the VH1 may comprise a CDR1 comprising a sequence having at least 90% identity to SEQ ID NO: 104, a CDR2 comprising a sequence having at least 90% identity to SEQ ID NO: 105, and a CDR3 comprising a sequence having at least 90% identity to SEQ ID NO: 106; and the VL1 may comprise a CDR1 comprising a sequence having at least 90% identity to SEQ ID NO: 107, a CDR2 comprising a sequence having at least 90% identity to SEQ ID NO: 108 and a CDR3 comprising a sequence having at least 90% identity to SEQ ID NO: 109. At least 90% identity may include at least 91%, 92%, 93%, 94%, 95%, 96%, 97%, 98%, 99% or 100% identity to the reference polypeptide sequence. For example, the VH1 may comprise a CDR1 comprising SEQ ID NO: 104, a CDR2 comprising SEQ ID NO: 105, and a CDR3 comprising SEQ ID NO: 106; and the VL1 may comprise a CDR1 comprising SEQ ID NO: 107, a CDR2 comprising SEQ ID NO: 108 and a CDR3 comprising SEQ ID NO: 109.

[0181] In some aspects, VH2 comprises a CDR1 comprising SEQ ID NO:104 or a sequence having at least 90% or at least 95% identity to SEQ ID NO:104; a CDR2 comprising SEQ ID NO:105 or a sequence having at least 90% identity or at least 95% identity to SEQ ID NO:105; and a CDR3 comprising SEQ ID NO:106 or a sequence having at least 90% identity or at least 95% identity to SEQ ID NO:106; and VL2 comprises a CDR1 comprising SEQ ID NO:107 or a sequence having at least 90% identity or at least 95% identity to SEQ ID NO:107, a CDR2 comprising SEQ ID NO:108 or a sequence having at least 90% identity or 95% identity to SEQ ID NO:108, and a CDR3 comprising SEQ ID NO:109 or a sequence having at least 90% identity or at least 95% identity to SEQ ID NO:109. For example, the VH2 may comprise a CDR1 comprising a sequence having at least 90% identity to SEQ ID NO: 104, a CDR2 comprising a sequence having at least 90% identity to SEQ ID NO: 105, and a CDR3 comprising a sequence having at least 90% identity to SEQ ID NO: 106; and the VL2 may comprise a CDR1 comprising a sequence having at least 90% identity to SEQ ID NO: 107, a CDR2 comprising a sequence having at least 90% identity to SEQ ID NO: 108 and a CDR3 comprising a sequence having at least 90% identity to SEQ ID NO: 109. At least 90% identity may include at least 91%, 92%, 93%, 94%, 95%, 96%, 97%, 98%, 99% or 100% identity to the reference polypeptide sequence. For example, the VH2 may comprise a CDR1 comprising SEQ ID NO: 104, a CDR2 comprising SEQ ID NO: 105, and a CDR3 comprising SEQ ID NO: 106; and the VL2 may comprise a CDR1 comprising SEQ ID NO: 107, a CDR2 comprising SEQ ID NO: 108 and a CDR3 comprising SEQ ID NO: 109.

[0182] In some aspects, VH1 comprises a CDR1 comprising SEQ ID NO:56 or a sequence having at least 90% identity or at least 95% identity to SEQ ID NO:56; a CDR2 comprising SEQ ID NO:57 or a sequence having at least 90% identity or at least 95% identity to SEQ ID NO:57; and a CDR3 comprising SEQ ID NO:58 or a sequence having at least 90% identity or at least 95% identity to SEQ ID NO:58; and VL1 comprises a CDR1 comprising SEQ ID NO:59 or a sequence having at least 90% identity or at least 95% identity to SEQ ID NO:59, a CDR2 comprising SEQ ID NO:60 or a sequence having at least 90% identity or 95% identity to SEQ ID NO:60, and a CDR3 comprising SEQ ID NO:61 or a sequence having at least 90% identity or at least 95% identity to SEQ ID NO:61. For example, the VH1 may comprise a CDR1 comprising a sequence having at least 90% identity to SEQ ID NO: 56, a CDR2 comprising a sequence having at least 90% identity to SEQ ID NO: 57, and a CDR3 comprising a sequence having at least 90% identity to SEQ ID NO: 58; and the VL1 may comprise a CDR1 comprising a sequence having at least 90% identity to SEQ ID NO: 59, a CDR2 comprising a sequence having at least 90% identity to SEQ ID NO: 60 and a CDR3 comprising a sequence having at least 90% identity to SEQ ID NO: 61. At least 90% identity may include at least 91%, 92%, 93%, 94%, 95%, 96%, 97%, 98%, 99% or 100% identity to the reference polypeptide sequence. For example, the VH1 may comprise a CDR1 comprising SEQ ID NO: 56, a CDR2 comprising SEQ ID NO: 57, and a CDR3 comprising SEQ ID NO: 58; and the VL1 may comprise a CDR1 comprising SEQ ID NO: 59, a CDR2 comprising SEQ ID NO: 60 and a CDR3 comprising SEQ ID NO: 61.

[0183] In some aspects, VH2 comprises a CDR1 comprising SEQ ID NO:56 or a sequence having at least 90% or at least 95% identity to SEQ ID NO:56; a CDR2 comprising SEQ ID NO:57 or a sequence having at least 90% identity or at least 95% identity to SEQ ID NO:57; and a CDR3 comprising SEQ ID NO:58 or a sequence having at least 90% identity or at least 95% identity to SEQ ID NO:58; and VL2 comprises a CDR1 comprising SEQ ID NO:59 or a sequence having at least 90% identity or at least 95% identity to SEQ ID NO:59, a CDR2 comprising SEQ ID NO:60 or a sequence having at least 90% identity or 95% identity to SEQ ID NO:60, and a CDR3 comprising SEQ ID NO:61 or a sequence having at least 90% identity or at least 95% identity to SEQ ID NO:61. For example, the VH2 may comprise a CDR1 comprising a sequence having at least 90% identity to SEQ ID NO: 56, a CDR2 comprising a sequence having at least 90% identity to SEQ ID NO: 57, and a CDR3 comprising a sequence having at least 90% identity to SEQ ID NO: 58; and the VL2 may comprise a CDR1 comprising a sequence having at least 90% identity to SEQ ID NO: 59, a CDR2 comprising a sequence having at least 90% identity to SEQ ID NO: 60 and a CDR3 comprising a sequence having at least 90% identity to SEQ ID NO: 61. At least 90% identity may include at least 91%, 92%, 93%, 94%, 95%, 96%, 97%, 98%, 99% or 100% identity to the reference polypeptide sequence. For example, the VH2 may comprise a CDR1 comprising SEQ ID NO: 56, a CDR2 comprising SEQ ID NO: 57, and a CDR3 comprising SEQ ID NO: 58; and the VL2 may comprise a CDR1 comprising SEQ ID NO: 59, a CDR2 comprising SEQ ID NO: 60 and a CDR3 comprising SEQ ID NO: 61.

[0184] In some aspects, VH1 comprises a CDR1 comprising SEQ ID NO:110 or a sequence having at least 90% identity or at least 95% identity to SEQ ID NO:110; a CDR2 comprising SEQ ID NO:111 or a sequence having at least 90% identity or at least 95% identity to SEQ ID NO:111; and a CDR3 comprising SEQ ID NO:112 or a sequence having at least 90% identity or at least 95% identity to SEQ ID NO:112; and VL1 comprises a CDR1 comprising SEQ ID NO:113 or a sequence having at least 90% identity or at least 95% identity to SEQ ID NO:113, a CDR2 comprising SEQ ID NO:114 or a sequence having at least 90% identity or 95% identity to SEQ ID NO:114, and a CDR3 comprising SEQ ID NO:115 or a sequence having at least 90% identity or at least 95% identity to SEQ ID NO:115. For example, the VH1 may comprise a CDR1 comprising a sequence having at least 90% identity to SEQ ID NO: 110, a CDR2 comprising a sequence having at least 90% identity to SEQ ID NO: 111, and a CDR3 comprising a sequence having at least 90% identity to SEQ ID NO: 112; and the VL1 may comprise a CDR1 comprising a sequence having at least 90% identity to SEQ ID NO: 113, a CDR2 comprising a sequence having at least 90% identity to SEQ ID NO: 114 and a CDR3 comprising a sequence having at least 90% identity to SEQ ID NO: 115. At least 90% identity may include at least 91%, 92%, 93%, 94%, 95%, 96%, 97%, 98%, 99% or 100% identity to the reference polypeptide sequence. For example, the VH1 may comprise a CDR1 comprising SEQ ID NO: 110, a CDR2 comprising SEQ ID NO: 111, and a CDR3 comprising SEQ ID NO: 112; and the VL1 may comprise a CDR1 comprising SEQ ID NO: 113, a CDR2 comprising SEQ ID NO: 114 and a CDR3 comprising SEQ ID NO: 115.

[0185] In some aspects, VH2 comprises a CDR1 comprising SEQ ID NO:110 or a sequence having at least 90% or at least 95% identity to SEQ ID NO:110; a CDR2 comprising SEQ ID NO:111 or a sequence having at least 90% identity or at least 95% identity to SEQ ID NO:111; and a CDR3 comprising SEQ ID NO:112 or a sequence having at least 90% identity or at least 95% identity to SEQ ID NO:112; and VL2 comprises a CDR1 comprising SEQ ID NO:113 or a sequence having at least 90% identity or at least 95% identity to SEQ ID NO:113, a CDR2 comprising SEQ ID NO:114 or a sequence having at least 90% identity or 95% identity to SEQ ID NO:114, and a CDR3 comprising SEQ ID NO:115 or a sequence having at least 90% identity or at least 95% identity to SEQ ID NO:115. For example, the VH2 may comprise a CDR1 comprising a sequence having at least 90% identity to SEQ ID NO: 110, a CDR2 comprising a sequence having at least 90% identity to SEQ ID NO: 111, and a CDR3 comprising a sequence having at least 90% identity to SEQ ID NO: 112; and the VL2 may comprise a CDR1 comprising a sequence having at least 90% identity to SEQ ID NO: 113, a CDR2 comprising a sequence having at least 90% identity to SEQ ID NO: 114 and a CDR3 comprising a sequence having at least 90% identity to SEQ ID NO: 115. At least 90% identity may include at least 91%, 92%, 93%, 94%, 95%, 96%, 97%, 98%, 99% or 100% identity to the reference polypeptide sequence. For example, the VH2 may comprise a CDR1 comprising SEQ ID NO: 110, a CDR2 comprising SEQ ID NO: 111, and a CDR3 comprising SEQ ID NO: 112; and the VL2 may comprise a CDR1 comprising SEQ ID NO: 113, a CDR2 comprising SEQ ID NO: 114 and a CDR3 comprising SEQ ID NO: 115.

[0186] In some aspects, VH1 comprises a CDR1 comprising SEQ ID NO:116 or a sequence having at least 90% identity or at least 95% identity to SEQ ID NO:116; a CDR2 comprising SEQ ID NO:117 or a sequence having at least 90% identity or at least 95% identity to SEQ ID NO:117; and a CDR3 comprising SEQ ID NO:118 or a sequence having at least 90% identity or at least 95% identity to SEQ ID NO:118; and VL1 comprises a CDR1 comprising SEQ ID NO:119 or a sequence having at least 90% identity or at least 95% identity to SEQ ID NO:119, a CDR2 comprising SEQ ID NO:120 or a sequence having at least 90% identity or 95% identity to SEQ ID NO:120, and a CDR3 comprising SEQ ID NO:121 or a sequence having at least 90% identity or at least 95% identity to SEQ ID NO:121. For example, the VH1 may comprise a CDR1 comprising a sequence having at least 90% identity to SEQ ID NO: 116, a CDR2 comprising a sequence having at least 90% identity to SEQ ID NO: 117, and a CDR3 comprising a sequence having at least 90% identity to SEQ ID NO: 118; and the VL1 may comprise a CDR1 comprising a sequence having at least 90% identity to SEQ ID NO: 119, a CDR2 comprising a sequence having at least 90% identity to SEQ ID NO: 120 and a CDR3 comprising a sequence having at least 90% identity to SEQ ID NO: 121. At least 90% identity may include at least 91%, 92%, 93%, 94%, 95%, 96%, 97%, 98%, 99% or 100% identity to the reference polypeptide sequence. For example, the VH1 may comprise a CDR1 comprising SEQ ID NO: 116, a CDR2 comprising SEQ ID NO: 117, and a CDR3 comprising SEQ ID NO: 118; and the VL1 may comprise a CDR1 comprising SEQ ID NO: 119, a CDR2 comprising SEQ ID NO: 120 and a CDR3 comprising SEQ ID NO: 121.

[0187] In some aspects, VH2 comprises a CDR1 comprising SEQ ID NO:116 or a sequence having at least 90% or at least 95% identity to SEQ ID NO:116; a CDR2 comprising SEQ ID NO:117 or a sequence having at least 90% identity or at least 95% identity to SEQ ID NO:117; and a CDR3 comprising SEQ ID NO:118 or a sequence having at least 90% identity or at least 95% identity to SEQ ID NO:118; and VL2 comprises a CDR1 comprising SEQ ID NO:119 or a sequence having at least 90% identity or at least 95% identity to SEQ ID NO:119, a CDR2 comprising SEQ ID NO:120 or a sequence having at least 90% identity or 95% identity to SEQ ID NO:120, and a CDR3 comprising SEQ ID NO:121 or a sequence having at least 90% identity or at least 95% identity to SEQ ID NO:121. For example, the VH2 may comprise a CDR1 comprising a sequence having at least 90% identity to SEQ ID NO: 116, a CDR2 comprising a sequence having at least 90% identity to SEQ ID NO: 117, and a CDR3 comprising a sequence having at least 90% identity to SEQ ID NO: 118; and the VL2 may comprise a CDR1 comprising a sequence having at least 90% identity to SEQ ID NO: 119, a CDR2 comprising a sequence having at least 90% identity to SEQ ID NO: 120 and a CDR3 comprising a sequence having at least 90% identity to SEQ ID NO: 121. At least 90% identity may include at least 91%, 92%, 93%, 94%, 95%, 96%, 97%, 98%, 99% or 100% identity to the reference polypeptide sequence. For example, the VH2 may comprise a CDR1 comprising SEQ ID NO: 116, a CDR2 comprising SEQ ID NO: 117, and a CDR3 comprising SEQ ID NO: 118; and the VL2 may comprise a CDR1 comprising SEQ ID NO: 119, a CDR2 comprising SEQ ID NO: 120 and a CDR3 comprising SEQ ID NO: 121.

[0188] In some aspects, VH1 comprises a CDR1 comprising SEQ ID NO:124 or a sequence having at least 90% identity or at least 95% identity to SEQ ID NO:124; a CDR2 comprising SEQ ID NO:125 or a sequence having at least 90% identity or at least 95% identity to SEQ ID NO:125; and a CDR3 comprising SEQ ID NO:126 or a sequence having at least 90% identity or at least 95% identity to SEQ ID NO:126; and VL1 comprises a CDR1 comprising SEQ ID NO:127 or a sequence having at least 90% identity or at least 95% identity to SEQ ID NO:127, a CDR2 comprising SEQ ID NO:128 or a sequence having at least 90% identity or 95% identity to SEQ ID NO:128, and a CDR3 comprising SEQ ID NO:129 or a sequence having at least 90% identity or at least 95% identity to SEQ ID NO:129. For example, the VH1 may comprise a CDR1 comprising a sequence having at least 90% identity to SEQ ID NO: 124, a CDR2 comprising a sequence having at least 90% identity to SEQ ID NO: 125, and a CDR3 comprising a sequence having at least 90% identity to SEQ ID NO: 126; and the VL1 may comprise a CDR1 comprising a sequence having at least 90% identity to SEQ ID NO: 127, a CDR2 comprising a sequence having at least 90% identity to SEQ ID NO: 128 and a CDR3 comprising a sequence having at least 90% identity to SEQ ID NO: 129. At least 90% identity may include at least 91%, 92%, 93%, 94%, 95%, 96%, 97%, 98%, 99% or 100% identity to the reference polypeptide sequence. For example, the VH1 may comprise a CDR1 comprising SEQ ID NO: 124, a CDR2 comprising SEQ ID NO: 125, and a CDR3 comprising SEQ ID NO: 126; and the VL1 may comprise a CDR1 comprising SEQ ID NO: 127, a CDR2 comprising SEQ ID NO: 128 and a CDR3 comprising SEQ ID NO: 129.

[0189] In some aspects, VH2 comprises a CDR1 comprising SEQ ID NO:124 or a sequence having at least 90% or at least 95% identity to SEQ ID NO:124; a CDR2 comprising SEQ ID NO:125 or a sequence having at least 90% identity or at least 95% identity to SEQ ID NO:125; and a CDR3 comprising SEQ ID NO:126 or a sequence having at least 90% identity or at least 95% identity to SEQ ID NO:126; and VL2 comprises a CDR1 comprising SEQ ID NO:127 or a sequence having at least 90% identity or at least 95% identity to SEQ ID NO:127, a CDR2 comprising SEQ ID NO:128 or a sequence having at least 90% identity or 95% identity to SEQ ID NO:128, and a CDR3 comprising SEQ ID NO:129 or a sequence having at least 90% identity or at least 95% identity to SEQ ID NO:129. For example, the VH2 may comprise a CDR1 comprising a sequence having at least 90% identity to SEQ ID NO: 124, a CDR2 comprising a sequence having at least 90% identity to SEQ ID NO: 125, and a CDR3 comprising a sequence having at least 90% identity to SEQ ID NO: 126; and the VL2 may comprise a CDR1 comprising a sequence having at least 90% identity to SEQ ID NO: 127, a CDR2 comprising a sequence having at least 90% identity to SEQ ID NO: 128 and a CDR3 comprising a sequence having at least 90% identity to SEQ ID NO: 129. At least 90% identity may include at least 91%, 92%, 93%, 94%, 95%, 96%, 97%, 98%, 99% or 100% identity to the reference polypeptide sequence. For example, the VH2 may comprise a CDR1 comprising SEQ ID NO: 124, a CDR2 comprising SEQ ID NO: 125, and a CDR3 comprising SEQ ID NO: 126; and the VL2 may comprise a CDR1 comprising SEQ ID NO: 127, a CDR2 comprising SEQ ID NO: 128 and a CDR3 comprising SEQ ID NO: 129.

[0190] In some aspects, VH1 comprises an amino acid sequence having at least 90% identity, at least 95% identity, or 100% identity to SEQ ID NO:21; VH2 comprises an amino acid sequence having at least 90% identity, at least 95% identity, or 100% identity to SEQ ID NO:20; VL1 comprises an amino acid sequence having at least 90% identity, at least 95% identity, or 100% identity to SEQ ID NO:27; and VL2 comprises an amino acid sequence having at least 90% identity, at least 95% identity, or 100% identity to SEQ ID NO:26. For example, VH1 may comprise an amino acid sequence having at least 90% identity to SEQ ID NO:21; VH2 may comprise an amino acid sequence having at least 90% identity to SEQ ID NO:20; VL1 may comprise an amino acid sequence having at least 90% identity to SEQ ID NO:27; and VL2 may comprises an amino acid sequence having at least 90% identity to SEQ ID NO:26. At least 90% identity may include at least 91%, 92%, 93%, 94%, 95%, 96%, 97%, 98%, 99% or 100% identity to the reference polypeptide sequence. For example, VH1 may comprise the amino acid sequence of SEQ ID NO:21; VH2 may comprise the amino acid sequence of SEQ ID NO:20; VL1 may comprise the amino acid sequence of SEQ ID NO:27; and VL2 may comprises the amino acid sequence of SEQ ID NO:26. In some aspects, VH1 comprises an amino acid sequence having at least 90% identity, at least 95% identity, or 100% identity to SEQ ID NO:23; VH2 comprises an amino acid sequence having at least 90% identity, at least 95% identity, or 100% identity to SEQ ID NO:22; VL1 comprises an amino acid sequence having at least 90% identity, at least 95% identity, or 100% identity to SEQ ID NO:28; and VL2 comprises an amino acid sequence having at least 90% identity, at least 95% identity, or 100% identity to SEQ ID NO:29. For example, VH1 may comprise an amino acid sequence having at least 90% identity to SEQ ID NO:23; VH2 may comprise an amino acid sequence having at least 90% identity to SEQ ID NO:22; VL1 may comprise an amino acid sequence having at least 90% identity to SEQ ID NO:28; and VL2 may comprises an amino acid sequence having at least 90% identity to SEQ ID NO:29. At least 90% identity may include at least 91%, 92%, 93%, 94%, 95%, 96%, 97%, 98%, 99% or 100% identity to the reference polypeptide sequence. For example, VH1 may comprise the amino acid sequence of SEQ ID NO:23; VH2 may comprise the amino acid sequence of SEQ ID NO:22; VL1 may comprise the amino acid sequence of SEQ ID NO:28; and VL2 may comprises the amino acid sequence of SEQ ID NO:29.

[0191] In some aspects, VH1 comprises an amino acid sequence having at least 90% identity, at least 95% identity, or 100% identity to SEQ ID NO:22; VH2 comprises an amino acid sequence having at least 90% identity, at least 95% identity, or 100% identity to SEQ ID NO:23; VL1 comprises an amino acid sequence having at least 90% identity, at least 95% identity, or 100% identity to SEQ ID NO:29; and VL2 comprises an amino acid sequence having at least 90% identity, at least 95% identity, or 100% identity to SEQ ID NO:28. For example, VH1 may comprise an amino acid sequence having at least 90% identity to SEQ ID NO:22; VH2 may comprise an amino acid sequence having at least 90% identity to SEQ ID NO:23; VL1 may comprise an amino acid sequence having at least 90% identity to SEQ ID NO:29; and VL2 may comprises an amino acid sequence having at least 90% identity to SEQ ID NO:28. At least 90% identity may include at least 91%, 92%, 93%, 94%, 95%, 96%, 97%, 98%, 99% or 100% identity to the reference polypeptide sequence. For example, VH1 may comprise the amino acid sequence of SEQ ID NO:22; VH2 may comprise the amino acid sequence of SEQ ID NO:23; VL1 may comprise the amino acid sequence of SEQ ID NO:29; and VL2 may comprises the amino acid sequence of SEQ ID NO:28.

[0192] In some aspects, VH1 comprises an amino acid sequence having at least 90% identity, at least 95% identity, or 100% identity to SEQ ID NO:24; VH2 comprises an amino acid sequence having at least 90% identity, at least 95% identity, or 100% identity to SEQ ID NO:25; VL1 comprises an amino acid sequence having at least 90% identity, at least 95% identity, or 100% identity to SEQ ID NO:30; and VL2 comprises an amino acid sequence having at least 90% identity, at least 95% identity, or 100% identity to SEQ ID NO:31. For example, VH1 may comprise an amino acid sequence having at least 90% identity to SEQ ID NO:24; VH2 may comprise an amino acid sequence having at least 90% identity to SEQ ID NO:25; VL1 may comprise an amino acid sequence having at least 90% identity to SEQ ID NO:30; and VL2 may comprises an amino acid sequence having at least 90% identity to SEQ ID NO:31. At least 90% identity may include at least 91%, 92%, 93%, 94%, 95%, 96%, 97%, 98%, 99% or 100% identity to the reference polypeptide sequence. For example, VH1 may comprise the amino acid sequence of SEQ ID NO:24; VH2 may comprise the amino acid sequence of SEQ ID NO:25; VL1 may comprise the amino acid sequence of SEQ ID NO:30; and VL2 may comprises the amino acid sequence of SEQ ID NO:31.

[0193] In some aspects, VH1 comprises an amino acid sequence having at least 90% identity, at least 95% identity, or 100% identity to SEQ ID NO:25; VH2 comprises an amino acid sequence having at least 90% identity, at least 95% identity, or 100% identity to SEQ ID NO:24; VL1 comprises an amino acid sequence having at least 90% identity, at least 95% identity, or 100% identity to SEQ ID NO:31; and VL2 comprises an amino acid sequence having at least 90% identity, at least 95% identity, or 100% identity to SEQ ID NO:30. For example, VH1 may comprise an amino acid sequence having at least 90% identity to SEQ ID NO:25; VH2 may comprise an amino acid sequence having at least 90% identity to SEQ ID NO:24; VL1 may comprise an amino acid sequence having at least 90% identity to SEQ ID NO:31; and VL2 may comprises an amino acid sequence having at least 90% identity to SEQ ID NO:30. At least 90% identity may include at least 91%, 92%, 93%, 94%, 95%, 96%, 97%, 98%, 99% or 100% identity to the reference polypeptide sequence. For example, VH1 may comprise the amino acid sequence of SEQ ID NO:25; VH2 may comprise the amino acid sequence of SEQ ID NO:24; VL1 may comprise the amino acid sequence of SEQ ID NO:31; and VL2 may comprises the amino acid sequence of SEQ ID NO:30.

[0194] In some aspects, VH1 comprises an amino acid sequence having at least 90% identity, at least 95% identity, or 100% identity to SEQ ID NO:20; VH2 comprises an amino acid sequence having at least 90% identity, at least 95% identity, or 100% identity to SEQ ID NO:21; VL1 comprises an amino acid sequence having at least 90% identity, at least 95% identity, or 100% identity to SEQ ID NO:26; and VL2 comprises an amino acid sequence having at least 90% identity, at least 95% identity, or 100% identity to SEQ ID NO:27. For example, VH1 may comprise an amino acid sequence having at least 90% identity to SEQ ID NO:20; VH2 may comprise an amino acid sequence having at least 90% identity to SEQ ID NO:21; VL1 may comprise an amino acid sequence having at least 90% identity to SEQ ID NO:26; and VL2 may comprises an amino acid sequence having at least 90% identity to SEQ ID NO:27. At least 90% identity may include at least 91%, 92%, 93%, 94%, 95%, 96%, 97%, 98%, 99% or 100% identity to the reference polypeptide sequence. For example, VH1 may comprise the amino acid sequence of SEQ ID NO:20; VH2 may comprise the amino acid sequence of SEQ ID NO:21; VL1 may comprise the amino acid sequence of SEQ ID NO:26; and VL2 may comprises the amino acid sequence of SEQ ID NO:27.

[0195] In some aspects, the VH1 comprises an amino acid sequence having at least 90% identity, at least 95% identity, or 100% identity to SEQ ID NO:20 or 25; VH2 comprises an amino acid sequence having at least 90% identity, at least 95% identity, or 100% identity to SEQ ID NO:122; VL1 an amino acid sequence having at least 90% identity, at least 95% identity, or 100% identity to SEQ ID NO:26 or 31; and VL2 comprises an amino acid sequence having at least 90% identity, at least 95% identity, or 100% identity to SEQ ID NO:123. For example, VH1 may comprise an amino acid sequence having at least 90% identity to SEQ ID NO:20 or 25; VH2 may comprise an amino acid sequence having at least 90% identity to SEQ ID NO:122; VL1 may comprise an amino acid sequence having at least 90% identity to SEQ ID NO:26 or 31; and VL2 may comprises an amino acid sequence having at least 90% identity to SEQ ID NO:123. At least 90% identity may include at least 91%, 92%, 93%, 94%, 95%, 96%, 97%, 98%, 99% or 100% identity to the reference polypeptide sequence. For example, VH1 may comprise the amino acid sequence of SEQ ID NO:20 or 25; VH2 may comprise the amino acid sequence of SEQ ID NO:122; VL1 may comprise the amino acid sequence of SEQ ID NO:26 or 31; and VL2 may comprises the amino acid sequence of SEQ ID NO:123. For example, VH1 may comprise the amino acid sequence of SEQ ID NO:20; VH2 may comprise the amino acid sequence of SEQ ID NO:122; VL1 may comprise the amino acid sequence of SEQ ID NO:26; and VL2 may comprises the amino acid sequence of SEQ ID NO:123. For example, VH1 may comprise the amino acid sequence of SEQ ID NO:20; VH2 may comprise the amino acid sequence of SEQ ID NO:122; VL1 may comprise the amino acid sequence of SEQ ID NO: 31, and VL2 may comprises the amino acid sequence of SEQ ID NO:123. For example, VH1 may comprise the amino acid sequence of SEQ ID NO:25; VH2 may comprise the amino acid sequence of SEQ ID NO:122; VL1 may comprise the amino acid sequence of SEQ ID NO:26; and VL2 may comprises the amino acid sequence of SEQ ID NO:123. For example, VH1 may comprise the amino acid sequence of SEQ ID NO:25; VH2 may comprise the amino acid sequence of SEQ ID NO:122; VL1 may comprise the amino acid sequence of SEQ ID NO:31; and VL2 may comprises the amino acid sequence of SEQ ID NO:123.

[0196] In some aspects, the VH1 comprises an amino acid sequence having at least 90% identity, at least 95% identity, or 100% identity to SEQ ID NO:122; VH2 comprises an amino acid sequence having at least 90% identity, at least 95% identity, or 100% identity to SEQ ID NO:20 or 25; VL1 comprises an amino acid sequence having at least 90% identity, at least 95% identity, or 100% identity to SEQ ID NO:123; and VL2 comprises an amino acid sequence having at least 90% identity, at least 95% identity, or 100% identity to SEQ ID NO:26 or 31. For example, VH1 may comprise an amino acid sequence having at least 90% identity to SEQ ID NO: 122; VH2 may comprise an amino acid sequence having at least 90% identity to SEQ ID NO:20 or 25; VL1 may comprise an amino acid sequence having at least 90% identity to SEQ ID NO: 123; and VL2 may comprises an amino acid sequence having at least 90% identity to SEQ ID NO:26 or 31. At least 90% identity may include at least 91%, 92%, 93%, 94%, 95%, 96%, 97%, 98%, 99% or 100% identity to the reference polypeptide sequence. For example, VH1 may comprise the amino acid sequence of SEQ ID NO:122; VH2 may comprise the amino acid sequence of SEQ ID NO:20 or 25; VL1 may comprise the amino acid sequence of SEQ ID NO:123; and VL2 may comprises the amino acid sequence of SEQ ID NO: 26 or 31. For example, VH1 may comprise the amino acid sequence of SEQ ID NO: 122; VH2 may comprise the amino acid sequence of SEQ ID NO:20; VL1 may comprise the amino acid sequence of SEQ ID NO:123; and VL2 may comprises the amino acid sequence of SEQ ID NO:26. For example, VH1 may comprise the amino acid sequence of SEQ ID NO:122; VH2 may comprise the amino acid sequence of SEQ ID NO:20; VL1 may comprise the amino acid sequence of SEQ ID NO: 123, and VL2 may comprises the amino acid sequence of SEQ ID NO:31. For example, VH1 may comprise the amino acid sequence of SEQ ID NO:122; VH2 may comprise the amino acid sequence of SEQ ID NO:25; VL1 may comprise the amino acid sequence of SEQ ID NO:123; and VL2 may comprises the amino acid sequence of SEQ ID NO:26. For example, VH1 may comprise the amino acid sequence of SEQ ID NO:122; VH2 may comprise the amino acid sequence of SEQ ID NO:25; VL1 may comprise the amino acid sequence of SEQ ID NO:123; and VL2 may comprises the amino acid sequence of SEQ ID NO:31.

[0197] In some aspects, the invention is directed to an antigen binding polypeptide or antigen binding polypeptide complex (e.g., antibody or antigen binding fragment thereof) comprising an amino acid sequence having at least 90% identity, at least 95% identity, or 100% identity to any one of SEQ ID NOs:32-43, 62-79, 130-138, 633, 635, 637, 639, 641, 643, 645, 647, 649, 651, 653, 655, 657, 659, 661, 663, 665, 667, 669, 671, 673, 675, 677, and 679. For example, the antigen binding polypeptide or antigen binding polypeptide complex (e.g., antibody or antigen binding fragment thereof) may comprise an amino acid sequence having at least 90% (such as at least 91%, 92%, 93%, 94%, 95%, 96%, 97%, 98%, or 99%) identity to any one of SEQ ID NOs:32-43, 62-79, 130-138, 633, 635, 637, 639, 641, 643, 645, 647, 649, 651, 653, 655, 657, 659, 661, 663, 665, 667, 669, 671, 673, 675, 677, and 679. For example, the antigen binding polypeptide or antigen binding polypeptide complex (e.g., antibody or antigen binding fragment thereof) may comprise the amino acid sequence of SEQ ID NOs:32-43, 62-79, 130-138, 633, 635, 637, 639, 641, 643, 645, 647, 649, 651, 653, 655, 657, 659, 661, 663, 665, 667, 669, 671, 673, 675, 677, and 679. In other aspects, the invention is directed to an antigen binding polypeptide or antigen binding polypeptide complex (e.g., antibody or antigen binding fragment thereof) comprising an amino acid sequence having at least 90% identity, at least 95% identity, or 100% identity to the amino acid sequence of SEQ ID NOs:32 or 33 that does not contain the eight histidine residues at the C-terminus. For example, the antigen binding polypeptide or antigen binding polypeptide complex (e.g., antibody or antigen binding fragment thereof) may comprise an amino acid sequence having at least 90% identity to SEQ ID Nos: 32 or 33 that does not contain the eight histidine residues at the C-terminus. At least 90% identity may include at least 91%, 92%, 93%, 94%, 95%, 96%, 97%, 98%, 99% or 100% identity to the reference polypeptide sequence. For example, the antigen binding polypeptide or antigen binding polypeptide complex (e.g., antibody or antigen binding fragment thereof) may comprise the amino acid sequence of SEQ ID NOs: 32 or 33 that does not contain the eight histidine residues at the C-terminus.

[0198] In other aspects, the invention is directed to an antigen binding polypeptide or antigen binding polypeptide complex (e.g., antibody or antigen binding fragment thereof) comprising an amino acid sequence encoded by a polynucleotide of any one of SEQ ID NOs:44-55, 80-97, 139-147, 634, 636, 638, 640, 642, 644, 646, 648, 650, 652, 654, 656, 658, 660, 662, 664, 666, 668, 670, 672, 674, 676, 678, and 680, or a polynucleotide having at least 90% identity or at least 95% identity to any one of SEQ ID NOs:44-55, 80-97, 139-147, 634, 636, 638, 640, 642, 644, 646, 648, 650, 652, 654, 656, 658, 660, 662, 664, 666, 668, 670, 672, 674, 676, 678, and 680. For example, the antigen binding polypeptide or antigen binding polypeptide complex (e.g., antibody or antigen binding fragment thereof) may comprise an amino acid sequence encoded by a polynucleotide having at least 90% (such as at least 91%, 92%, 93%, 94%, 95%, 96%, 97%, 98%, or 99%) identity to any one of SEQ ID NOs: 44-55, 80-97, 139-147, 634, 636, 638, 640, 642, 644, 646, 648, 650, 652, 654, 656, 658, 660, 662, 664, 666, 668, 670, 672, 674, 676, 678, and 680. For example, the antigen binding polypeptide or antigen binding polypeptide complex (e.g., antibody or antigen binding fragment thereof) may comprise an amino acid sequence encoded by the polynucleotide of SEQ ID NOs: 44-55, 80-97, 139-147, 634, 636, 638, 640, 642, 644, 646, 648, 650, 652, 654, 656, 658, 660, 662, 664, 666, 668, 670, 672, 674, 676, 678, and 680.

[0199] In some aspects, the invention is directed to an antigen binding polypeptide complex comprising a first polypeptide and a second polypeptide; wherein the first polypeptide has a structure represented by VL1-VL2-VH2-VH1-Fc; VL1-L1-VL2-L2-VH2-L3-VH1-Fc; or VL1-L1-VL2-L2-VH2-L3-VH1-L4-Fc; wherein the second polypeptide has a structure represented by Fc; VL1-VL2-VH2-VH1-Fc; VL1-L1-VL2-L2-VH2-L3-VH1-Fc; or VL1-L1-VL2-L2-VH2-L3-VH1-L4-Fc; wherein VL1 is a first immunoglobulin light chain variable region; VL2 is a second immunoglobulin light chain variable region; VH1 is a first immunoglobulin heavy chain variable region; VH2 is a second immunoglobulin heavy chain variable region; Fc is a region comprising an immunoglobulin heavy chain constant region 2 (CH2), an immunoglobulin heavy chain constant region 3 (CH3), and optionally, an immunoglobulin hinge; L1, L2, L3 and L4 are amino acid linkers; VH1 comprises an amino acid sequence having at least 90% identity, at least 95% identity, or 100% identity to any one of SEQ ID NOs:20-25; VH2 comprises an amino acid sequence having at least 90% identity, at least 95% identity, or 100% identity to any one of SEQ ID NOs:20-25; VL1 comprises an amino acid sequence having at least 90% identity, at least 95% identity, or 100% identity to any one of SEQ ID NOs:26-31; and VL2 comprises an amino acid sequence having at least 90% identity, at least 95% identity, or 100% identity to any one of SEQ ID NOs:26-31. In some aspects, the first polypeptide has a structure represented by VL1-VL2-VH2-VH1-Fc and the second polypeptide has a structure represented by Fc. In some aspects, the first polypeptide has a structure represented by VL1-VL2-VH2-VH1-Fc and the second polypeptide has a structure represented by VL1-VL2-VH2-VH1-Fc. In some aspects, the first polypeptide has a structure represented by VL1-VL2-VH2-VH1-Fc and the second polypeptide has a structure represented by VL1-L1-VL2-L2-VH2-L3-VH1-Fc. In some aspects, the first polypeptide has a structure represented by VL1-VL2-VH2-VH1-Fc and the second polypeptide has a structure represented by VL1-L1-VL2-L2-VH2-L3-VH1-L4-Fc. In some aspects, the first polypeptide has a structure represented by VL1-L1-VL2-L2-VH2-L3-VH1-Fc and the second polypeptide has a structure represented by Fc. In some aspects, the first polypeptide has a structure represented by VL1-L1-VL2-L2-VH2-L3-VH1-Fc and the second polypeptide has a structure represented by VL1-VL2-VH2-VH1-Fc. In some aspects, the first polypeptide has a structure represented by VL1-L1-VL2-L2-VH2-L3-VH1-Fc and the second polypeptide has a structure represented by VL1-L1-VL2-L2-VH2-L3-VH1-Fc. In some aspects, the first polypeptide has a structure represented by VL1-L1-VL2-L2-VH2-L3-VH1-Fc and the second polypeptide has a structure represented by VL1-L1-VL2-L2-VH2-L3-VH1-L4-Fc. In some aspects, the first polypeptide has a structure represented by VL1-L1-VL2-L2-VH2-L3-VH1-L4-Fc and the second polypeptide has a structure represented by Fc. In some aspects, the first polypeptide has a structure represented by VL1-L1-VL2-L2-VH2-L3-VH1-L4-Fc and the second polypeptide has a structure represented by VL1-VL2-VH2-VH1-Fc. In some aspects, the first polypeptide has a structure represented by VL1-L1-VL2-L2-VH2-L3-VH1-L4-Fc and the second polypeptide has a structure represented by VL1-L1-VL2-L2-VH2-L3-VH1-Fc. In some aspects, the first polypeptide has a structure represented by VL1-L1-VL2-L2-VH2-L3-VH1-L4-Fc and the second polypeptide has a structure represented by VL1-L1-VL2-L2-VH2-L3-VH1-L4-Fc. In some aspects, the VH1 may comprise an amino acid sequence having at least 90% identity to any one of SEQ ID NOs:20-25; VH2 may comprise an amino acid sequence having at least 90% identity to any one of SEQ ID NOs:20-25; VL1 may comprise an amino acid sequence having at least 90% identity to any one of SEQ ID NOs:26-31; and/or VL2 may comprise an amino acid sequence having at least 90% identity to any one of SEQ ID NOs:26-31. At least 90% identity may include at least 91%, 92%, 93%, 94%, 95%, 96%, 97%, 98%, 99% or 100% identity to the reference polypeptide sequence. For example, the VH1 may comprise the amino acid sequence of any one of SEQ ID NOs:20-25; VH2 may comprise the amino acid sequence of any one of SEQ ID NOs:20-25; VL1 may comprise the amino acid sequence of any one of SEQ ID NOs:26-31; and/or VL2 may comprise the amino acid sequence of any one of SEQ ID NOs:26-31.

[0200] In other aspects, the invention is directed to an antigen binding polypeptide complex comprising a first polypeptide and a second polypeptide; wherein the first polypeptide has a structure represented by VL1-VL2-VH2-VH1-CL-CH1-Fc; VL1-VL2-VH2-VH1-CH1-CL-Fc; VL1-L1-VL2-L2-VH2-L3-VH1-CL-L4-CH1-Fc or VL1-L1-VL2-L2-VH2-L3-VH1-CH1-L4-CH1-Fc; wherein the second polypeptide has a structure represented by Fc; wherein VL1 is a first immunoglobulin light chain variable region; VL2 is a second immunoglobulin light chain variable region; VH1 is a first immunoglobulin heavy chain variable region; VH2 is a second immunoglobulin heavy chain variable region; Fc is a region comprising an immunoglobulin heavy chain constant region 2 (CH2), an immunoglobulin heavy chain constant region 3 (CH3), and optionally, an immunoglobulin hinge; CH1 is an immunoglobulin heavy chain constant region 1; CL is an immunoglobulin light chain constant region; L1, L2, L3 and L4 are amino acid linkers; VH1 comprises an amino acid sequence having at least 90% identity, at least 95% identity, or 100% identity to any one of SEQ ID NOs:20-25; VH2 comprises an amino acid sequence having at least 90% identity, at least 95% identity, or 100% identity to any one of SEQ ID NOs:20-25; VL1 comprises an amino acid sequence having at least 90% identity, at least 95% identity, or 100% identity to any one of SEQ ID NOs:26-31; and VL2 comprises an amino acid sequence having at least 90% identity, at least 95% identity, or 100% identity to any one of SEQ ID NOs:26-31. In some aspects, the first polypeptide has a structure represented by VL1-VL2-VH2-VH1-CL-CH1-Fc and the second polypeptide has a structure represented by Fc. In some aspects, the first polypeptide has a structure represented by VL1-VL2-VH2-VH1-CH1-CL-Fc and the second polypeptide has a structure represented by Fc. In some aspects, the first polypeptide has a structure represented by VL1-L1-VL2-L2-VH2-L3-VH1-CL-L4-CH1-Fc and the second polypeptide has a structure represented by Fc. In some aspects, the first polypeptide has a structure represented by VL1-L1-VL2-L2-VH2-L3-VH1-CH1-L4-CH1-Fc and the second polypeptide has a structure represented by Fc. In some aspects, the VH1 may comprise an amino acid sequence having at least 90% identity to any one of SEQ ID NOs:20-25; VH2 may comprise an amino acid sequence having at least 90% identity to any one of SEQ ID NOs:20-25; VL1 may comprise an amino acid sequence having at least 90% identity to any one of SEQ ID NOs:26-31; and/or VL2 may comprise an amino acid sequence having at least 90% identity to any one of SEQ ID NOs:26-31. At least 90% identity may include at least 91%, 92%, 93%, 94%, 95%, 96%, 97%, 98%, 99% or 100% identity to the reference polypeptide sequence. For example, the VH1 may comprise the amino acid sequence of any one of SEQ ID NOs:20-25; VH2 may comprise the amino acid sequence of any one of SEQ ID NOs:20-25; VL1 may comprise the amino acid sequence of any one of SEQ ID NOs:26-31; and/or VL2 may comprise the amino acid sequence of any one of SEQ ID NOs:26-31.

[0201] In other aspects, the invention is directed to an antigen binding polypeptide complex comprising a first polypeptide and a second polypeptide; wherein the first polypeptide has a structure represented by VL1-VL2-VH2-VH1-Fc; VL1-L1-VL2-L2-VH2-L3-VH1-Fc; or VL1-L1-VL2-L2-VH2-L3-VH1-L4-Fc; wherein the second polypeptide has a structure represented by Fc; VL1-VL2-VH2-VH1-Fc; VL1-L1-VL2-L2-VH2-L3-VH1-Fc; or VL1-L1-VL2-L2-VH2-L3-VH1-L4-Fc; wherein VL1 is a first immunoglobulin light chain variable region; VL2 is a second immunoglobulin light chain variable region; VH1 is a first immunoglobulin heavy chain variable region; VH2 is a second immunoglobulin heavy chain variable region; Fc is a region comprising an immunoglobulin heavy chain constant region 2 (CH2), an immunoglobulin heavy chain constant region 3 (CH3), and optionally, an immunoglobulin hinge; L1, L2, L3 and L4 are amino acid linkers; VH1 comprises an amino acid sequence having at least 90% identity, at least 95% identity, or 100% identity to any one of SEQ ID NO:25; VH2 comprises an amino acid sequence having at least 90% identity, at least 95% identity, or 100% identity to any one of SEQ ID NO:24; VL1 comprises an amino acid sequence having at least 90% identity, at least 95% identity, or 100% identity to any one of SEQ ID NO:31; and VL2 comprises an amino acid sequence having at least 90% identity, at least 95% identity, or 100% identity to any one of SEQ ID NO:30. In some aspects, the first polypeptide has a structure represented by VL1-VL2-VH2-VH1-Fc and the second polypeptide has a structure represented by Fc. In some aspects, the first polypeptide has a structure represented by VL1-VL2-VH2-VH1-Fc and the second polypeptide has a structure represented by VL1-VL2-VH2-VH1-Fc. In some aspects, the first polypeptide has a structure represented by VL1-VL2-VH2-VH1-Fc and the second polypeptide has a structure represented by VL1-L1-VL2-L2-VH2-L3-VH1-Fc. In some aspects, the first polypeptide has a structure represented by VL1-VL2-VH2-VH1-Fc and the second polypeptide has a structure represented by VL1-L1-VL2-L2-VH2-L3-VH1-L4-Fc. In some aspects, the first polypeptide has a structure represented by VL1-L1-VL2-L2-VH2-L3-VH1-Fc and the second polypeptide has a structure represented by Fc. In some aspects, the first polypeptide has a structure represented by VL1-L1-VL2-L2-VH2-L3-VH1-Fc and the second polypeptide has a structure represented by VL1-VL2-VH2-VH1-Fc. In some aspects, the first polypeptide has a structure represented by VL1-L1-VL2-L2-VH2-L3-VH1-Fc and the second polypeptide has a structure represented by VL1-L1-VL2-L2-VH2-L3-VH1-Fc. In some aspects, the first polypeptide has a structure represented by VL1-L1-VL2-L2-VH2-L3-VH1-Fc and the second polypeptide has a structure represented by VL1-L1-VL2-L2-VH2-L3-VH1-L4-Fc. In some aspects, the first polypeptide has a structure represented by VL1-L1-VL2-L2-VH2-L3-VH1-L4-Fc and the second polypeptide has a structure represented by Fc. In some aspects, the first polypeptide has a structure represented by VL1-L1-VL2-L2-VH2-L3-VH1-L4-Fc and the second polypeptide has a structure represented by VL1-VL2-VH2-VH1-Fc. In some aspects, the first polypeptide has a structure represented by VL1-L1-VL2-L2-VH2-L3-VH1-L4-Fc and the second polypeptide has a structure represented by VL1-L1-VL2-L2-VH2-L3-VH1-Fc. In some aspects, the first polypeptide has a structure represented by VL1-L1-VL2-L2-VH2-L3-VH1-L4-Fc and the second polypeptide has a structure represented by VL1-L1-VL2-L2-VH2-L3-VH1-L4-Fc. In some aspects, VH1 may comprise an amino acid sequence having at least 90% identity to SEQ ID NO: 25; VH2 may comprise an amino acid sequence having at least 90% identity to SEQ ID NO:24; VL1 may comprise an amino acid sequence having at least 90% identity to SEQ ID NO: 31; and VL2 may comprises an amino acid sequence having at least 90% identity to SEQ ID NO:30. At least 90% identity may include at least 91%, 92%, 93%, 94%, 95%, 96%, 97%, 98%, 99% or 100% identity to the reference polypeptide sequence. For example, VH1 may comprise the amino acid sequence of SEQ ID NO:25; VH2 may comprise the amino acid sequence of SEQ ID NO:24; VL1 may comprise the amino acid sequence of SEQ ID NO:31; and VL2 may comprises the amino acid sequence of SEQ ID NO: 30. In some aspects, the first polypeptide and the second polypeptide comprise an amino acid sequence having at least 90% identity, at least 95% identity, or 100% identity to SEQ ID NO:36 or 37. In some aspects, the first polypeptide and the second polypeptide may comprise an amino acid sequence having at least 90% identity (such as at least 91%, 92%, 93%, 94%, 95%, 96%, 97%, 98%, or 99%) to SEQ ID NO:36 or 37. In some aspects, the first polypeptide and the second polypeptide may comprise the amino acid sequence of SEQ ID NO:36 or 37. For example, the first polypeptide and second polypeptide may both comprise the amino acid sequence of SEQ ID NO: 36. For example, the first polypeptide and second polypeptide may both comprise the amino acid sequence of SEQ ID NO: 37. For example, the first polypeptide may comprise the amino acid sequence of SEQ ID NO: 36, and the second polypeptide may comprise the amino acid sequence of SEQ ID NO: 37. For example, the first polypeptide may comprise the amino acid sequence of SEQ ID NO: 37, and the second polypeptide may comprise the amino acid sequence of SEQ ID NO: 36.

[0202] In other aspects, the invention is directed to an antigen binding polypeptide complex comprising a first polypeptide and a second polypeptide; wherein the first polypeptide has a structure represented by VL1-VL2-VH2-VH1-Fc; VL1-L1-VL2-L2-VH2-L3-VH1-Fc; or VL1-L1-VL2-L2-VH2-L3-VH1-L4-Fc; wherein the second polypeptide has a structure represented by Fc; VL1-VL2-VH2-VH1-Fc; VL1-L1-VL2-L2-VH2-L3-VH1-Fc; or VL1-L1-VL2-L2-VH2-L3-VH1-L4-Fc; wherein VL1 is a first immunoglobulin light chain variable region; VL2 is a second immunoglobulin light chain variable region; VH1 is a first immunoglobulin heavy chain variable region; VH2 is a second immunoglobulin heavy chain variable region; Fc is a region comprising an immunoglobulin heavy chain constant region 2 (CH2), an immunoglobulin heavy chain constant region 3 (CH3), and optionally, an immunoglobulin hinge; L1, L2, L3 and L4 are amino acid linkers; VH1 comprises an amino acid sequence having at least 90% identity, at least 95% identity, or 100% identity to any one of SEQ ID NO:24; VH2 comprises an amino acid sequence having at least 90% identity, at least 95% identity, or 100% identity to any one of SEQ ID NO:25; VL1 comprises an amino acid sequence having at least 90% identity, at least 95% identity, or 100% identity to any one of SEQ ID NO:30; and VL2 comprises an amino acid sequence having at least 90% identity, at least 95% identity, or 100% identity to any one of SEQ ID NO:31. In some aspects, the first polypeptide has a structure represented by VL1-VL2-VH2-VH1-Fc and the second polypeptide has a structure represented by Fc. In some aspects, the first polypeptide has a structure represented by VL1-VL2-VH2-VH1-Fc and the second polypeptide has a structure represented by VL1-VL2-VH2-VH1-Fc. In some aspects, the first polypeptide has a structure represented by VL1-VL2-VH2-VH1-Fc and the second polypeptide has a structure represented by VL1-L1-VL2-L2-VH2-L3-VH1-Fc. In some aspects, the first polypeptide has a structure represented by VL1-VL2-VH2-VH1-Fc and the second polypeptide has a structure represented by VL1-L1-VL2-L2-VH2-L3-VH1-L4-Fc. In some aspects, the first polypeptide has a structure represented by VL1-L1-VL2-L2-VH2-L3-VH1-Fc and the second polypeptide has a structure represented by Fc. In some aspects, the first polypeptide has a structure represented by VL1-L1-VL2-L2-VH2-L3-VH1-Fc and the second polypeptide has a structure represented by VL1-VL2-VH2-VH1-Fc. In some aspects, the first polypeptide has a structure represented by VL1-L1-VL2-L2-VH2-L3-VH1-Fc and the second polypeptide has a structure represented by VL1-L1-VL2-L2-VH2-L3-VH1-Fc. In some aspects, the first polypeptide has a structure represented by VL1-L1-VL2-L2-VH2-L3-VH1-Fc and the second polypeptide has a structure represented by VL1-L1-VL2-L2-VH2-L3-VH1-L4-Fc. In some aspects, the first polypeptide has a structure represented by VL1-L1-VL2-L2-VH2-L3-VH1-L4-Fc and the second polypeptide has a structure represented by Fc. In some aspects, the first polypeptide has a structure represented by VL1-L1-VL2-L2-VH2-L3-VH1-L4-Fc and the second polypeptide has a structure represented by VL1-VL2-VH2-VH1-Fc. In some aspects, the first polypeptide has a structure represented by VL1-L1-VL2-L2-VH2-L3-VH1-L4-Fc and the second polypeptide has a structure represented by VL1-L1-VL2-L2-VH2-L3-VH1-Fc. In some aspects, the first polypeptide has a structure represented by VL1-L1-VL2-L2-VH2-L3-VH1-L4-Fc and the second polypeptide has a structure represented by VL1-L1-VL2-L2-VH2-L3-VH1-L4-Fc. In some aspects, VH1 may comprise an amino acid sequence having at least 90% identity to SEQ ID NO: 24; VH2 may comprise an amino acid sequence having at least 90% identity to SEQ ID NO:25; VL1 may comprise an amino acid sequence having at least 90% identity to SEQ ID NO: 30; and VL2 may comprises an amino acid sequence having at least 90% identity to SEQ ID NO:31. At least 90% identity may include at least 91%, 92%, 93%, 94%, 95%, 96%, 97%, 98%, 99% or 100% identity to the reference polypeptide sequence. For example, VH1 may comprise the amino acid sequence of SEQ ID NO:24; VH2 may comprise the amino acid sequence of SEQ ID NO:25; VL1 may comprise the amino acid sequence of SEQ ID NO:30; and VL2 may comprises the amino acid sequence of SEQ ID NO: 31. In some aspects, the first polypeptide and the second polypeptide comprise an amino acid sequence having at least 90% identity, at least 95% identity, or 100% identity to SEQ ID NO:34 or 35. In some aspects, the first polypeptide and the second polypeptide may comprise an amino acid sequence having at least 90% (such as at least 91%, 92%, 93%, 94%, 95%, 96%, 97%, 98%, or 99%) identity to SEQ ID NO:34 or 35. In some aspects, the first polypeptide and the second polypeptide may comprise the amino acid sequence of SEQ ID NO:34 or 35. For example, the first polypeptide and second polypeptide may both comprise the amino acid sequence of SEQ ID NO: 34. For example, the first polypeptide and second polypeptide may both comprise the amino acid sequence of SEQ ID NO: 35. For example, the first polypeptide may comprise the amino acid sequence of SEQ ID NO: 34, and the second polypeptide may comprise the amino acid sequence of SEQ ID NO: 35. For example, the first polypeptide may comprise the amino acid sequence of SEQ ID NO: 35, and the second polypeptide may comprise the amino acid sequence of SEQ ID NO: 34.

[0203] In other aspects, the invention is directed to an antigen binding polypeptide complex comprising a first polypeptide and a second polypeptide; wherein the first polypeptide has a structure represented by VL1-VL2-VH2-VH1-Fc; VL1-L1-VL2-L2-VH2-L3-VH1-Fc; or VL1-L1-VL2-L2-VH2-L3-VH1-L4-Fc; wherein the second polypeptide has a structure represented by Fc; VL1-VL2-VH2-VH1-Fc; VL1-L1-VL2-L2-VH2-L3-VH1-Fc; or VL1-L1-VL2-L2-VH2-L3-VH1-L4-Fc; wherein VL1 is a first immunoglobulin light chain variable region; VL2 is a second immunoglobulin light chain variable region; VH1 is a first immunoglobulin heavy chain variable region; VH2 is a second immunoglobulin heavy chain variable region; Fc is a region comprising an immunoglobulin heavy chain constant region 2 (CH2), an immunoglobulin heavy chain constant region 3 (CH3), and optionally, an immunoglobulin hinge; L1, L2, L3 and L4 are amino acid linkers; VH1 of the first polypeptide comprises an amino acid sequence having at least 90% identity, at least 95% identity, or 100% identity to any one of SEQ ID NO:25; VH2 of the first polypeptide comprises an amino acid sequence having at least 90% identity, at least 95% identity, or 100% identity to any one of SEQ ID NO:24; VL1 of the first polypeptide comprises an amino acid sequence having at least 90% identity, at least 95% identity, or 100% identity to any one of SEQ ID NO:31; VL2 of the first polypeptide comprises an amino acid sequence having at least 90% identity, at least 95% identity, or 100% identity to any one of SEQ ID NO:30; VH1 of the second polypeptide comprises an amino acid sequence having at least 90% identity, at least 95% identity, or 100% identity to any one of SEQ ID NO:24; VH2 of the second polypeptide comprises an amino acid sequence having at least 90% identity, at least 95% identity, or 100% identity to any one of SEQ ID NO:25; VL1 of the second polypeptide comprises an amino acid sequence having at least 90% identity, at least 95% identity, or 100% identity to any one of SEQ ID NO:30; and VL2 of the second polypeptide comprises an amino acid sequence having at least 90% identity, at least 95% identity, or 100% identity to any one of SEQ ID NO:31. In some aspects, the first polypeptide has a structure represented by VL1-VL2-VH2-VH1-Fc and the second polypeptide has a structure represented by Fc. In some aspects, the first polypeptide has a structure represented by VL1-VL2-VH2-VH1-Fc and the second polypeptide has a structure represented by VL1-VL2-VH2-VH1-Fc. In some aspects, the first polypeptide has a structure represented by VL1-VL2-VH2-VH1-Fc and the second polypeptide has a structure represented by VL1-L1-VL2-L2-VH2-L3-VH1-Fc. In some aspects, the first polypeptide has a structure represented by VL1-VL2-VH2-VH1-Fc and the second polypeptide has a structure represented by VL1-L1-VL2-L2-VH2-L3-VH1-L4-Fc. In some aspects, the first polypeptide has a structure represented by VL1-L1-VL2-L2-VH2-L3-VH1-Fc and the second polypeptide has a structure represented by Fc. In some aspects, the first polypeptide has a structure represented by VL1-L1-VL2-L2-VH2-L3-VH1-Fc and the second polypeptide has a structure represented by VL1-VL2-VH2-VH1-Fc. In some aspects, the first polypeptide has a structure represented by VL1-L1-VL2-L2-VH2-L3-VH1-Fc and the second polypeptide has a structure represented by VL1-L1-VL2-L2-VH2-L3-VH1-Fc. In some aspects, the first polypeptide has a structure represented by VL1-L1-VL2-L2-VH2-L3-VH1-Fc and the second polypeptide has a structure represented by VL1-L1-VL2-L2-VH2-L3-VH1-L4-Fc. In some aspects, the first polypeptide has a structure represented by VL1-L1-VL2-L2-VH2-L3-VH1-L4-Fc and the second polypeptide has a structure represented by Fc. In some aspects, the first polypeptide has a structure represented by VL1-L1-VL2-L2-VH2-L3-VH1-L4-Fc and the second polypeptide has a structure represented by VL1-VL2-VH2-VH1-Fc. In some aspects, the first polypeptide has a structure represented by VL1-L1-VL2-L2-VH2-L3-VH1-L4-Fc and the second polypeptide has a structure represented by VL1-L1-VL2-L2-VH2-L3-VH1-Fc. In some aspects, the first polypeptide has a structure represented by VL1-L1-VL2-L2-VH2-L3-VH1-L4-Fc and the second polypeptide has a structure represented by VL1-L1-VL2-L2-VH2-L3-VH1-L4-Fc. In some aspects, the first polypeptide comprises a VH1 comprising an amino acid sequence having at least 90% identity to SEQ ID NO: 25; a VH2 comprising an amino acid sequence having at least 90% identity to SEQ ID NO:24; a VL1 comprising an amino acid sequence having at least 90% identity to SEQ ID NO: 31; and a VL2 comprising an amino acid sequence having at least 90% identity to SEQ ID NO:30; and the second polypeptide comprises a VH1 comprising an amino acid sequence having at least 90% identity to SEQ ID NO: 24; a VH2 comprising an amino acid sequence having at least 90% identity to SEQ ID NO:25; a VL1 comprising an amino acid sequence having at least 90% identity to SEQ ID NO: 30; and a VL2 comprising an amino acid sequence having at least 90% identity to SEQ ID NO:31. At least 90% identity may include at least 91%, 92%, 93%, 94%, 95%, 96%, 97%, 98%, 99% or 100% identity to the reference polypeptide sequence. For example, the first polypeptide may comprise a VH1 comprising the amino acid sequence of SEQ ID NO:25; a VH2 comprising the amino acid sequence of SEQ ID NO:24; a VL1 comprising the amino acid sequence of SEQ ID NO:31; and a VL2 comprising the amino acid sequence of SEQ ID NO: 30, and the second polypeptide may comprise a VH1 comprising the amino acid sequence of SEQ ID NO:24; a VH2 comprising the amino acid sequence of SEQ ID NO:25; a VL1 comprising the amino acid sequence of SEQ ID NO:30; and a VL2 comprising the amino acid sequence of SEQ ID NO: 31. In some aspects, the first polypeptide comprises an amino acid sequence having at least 90% identity, at least 95% identity, or 100% identity to SEQ ID NO:36 or 37, and the second polypeptide comprises an amino acid sequence having at least 90% identity, at least 95% identity, or 100% identity to SEQ ID NO:34 or 35. In some aspects, the first polypeptide may comprise an amino acid sequence having at least 90% identity to SEQ ID NO:36 or 37 and the second polypeptide may comprise an amino acid sequence having at least 90% identity to SEQ ID NO: 34 or 35. At least 90% identity may include at least 91%, 92%, 93%, 94%, 95%, 96%, 97%, 98%, 99% or 100% identity to the reference polypeptide sequence. In some aspects, the first polypeptide may comprise the amino acid sequence of SEQ ID NO:36 or 37; and the second polypeptide may comprise the amino acid sequence of SEQ ID NO: 34 or 35. For example, the first polypeptide may comprise the amino acid sequence of SEQ ID NO: 36 and the second polypeptide may comprise the amino acid sequence of SEQ ID NO: 34. For example, the first polypeptide may comprise the amino acid sequence of SEQ ID NO: 36 and the second polypeptide may comprise the amino acid sequence of SEQ ID NO: 35. For example, the first polypeptide may comprise the amino acid sequence of SEQ ID NO: 37 and the second polypeptide may comprise the amino acid sequence of SEQ ID NO: 34. For example, the first polypeptide may comprise the amino acid sequence of SEQ ID NO: 37 and the second polypeptide may comprise the amino acid sequence of SEQ ID NO: 35.

[0204] In other aspects, the invention is directed to an antigen binding polypeptide complex comprising a first polypeptide and a second polypeptide; wherein the first polypeptide has a structure represented by VL1-VL2-VH2-VH1-Fc; VL1-L1-VL2-L2-VH2-L3-VH1-Fc; or VL1-L1-VL2-L2-VH2-L3-VH1-L4-Fc; wherein the second polypeptide has a structure represented by Fc; VL1-VL2-VH2-VH1-Fc; VL1-L1-VL2-L2-VH2-L3-VH1-Fc; or VL1-L1-VL2-L2-VH2-L3-VH1-L4-Fc; wherein VL1 is a first immunoglobulin light chain variable region; VL2 is a second immunoglobulin light chain variable region; VH1 is a first immunoglobulin heavy chain variable region; VH2 is a second immunoglobulin heavy chain variable region; Fc is a region comprising an immunoglobulin heavy chain constant region 2 (CH2), an immunoglobulin heavy chain constant region 3 (CH3), and optionally, an immunoglobulin hinge; L1, L2, L3 and L4 are amino acid linkers; VH1 of the first polypeptide comprises an amino acid sequence having at least 90% identity, at least 95% identity, or 100% identity to any one of SEQ ID NO:25; VH2 of the first polypeptide comprises an amino acid sequence having at least 90% identity, at least 95% identity, or 100% identity to any one of SEQ ID NO:24; VL1 of the first polypeptide comprises an amino acid sequence having at least 90% identity, at least 95% identity, or 100% identity to any one of SEQ ID NO:31; VL2 of the first polypeptide comprises an amino acid sequence having at least 90% identity, at least 95% identity, or 100% identity to any one of SEQ ID NO:30; VH1 of the second polypeptide comprises an amino acid sequence having at least 90% identity, at least 95% identity, or 100% identity to any one of SEQ ID NO:24; VH2 of the second polypeptide comprises an amino acid sequence having at least 90% identity, at least 95% identity, or 100% identity to any one of SEQ ID NO:25; VL1 of the second polypeptide comprises an amino acid sequence having at least 90% identity, at least 95% identity, or 100% identity to any one of SEQ ID NO:30; and VL2 of the second polypeptide comprises an amino acid sequence having at least 90% identity, at least 95% identity, or 100% identity to any one of SEQ ID NO:31. In some aspects, the first polypeptide has a structure represented by VL1-VL2-VH2-VH1-Fc and the second polypeptide has a structure represented by Fc. In some aspects, the first polypeptide has a structure represented by VL1-VL2-VH2-VH1-Fc and the second polypeptide has a structure represented by VL1-VL2-VH2-VH1-Fc. In some aspects, the first polypeptide has a structure represented by VL1-VL2-VH2-VH1-Fc and the second polypeptide has a structure represented by VL1-L1-VL2-L2-VH2-L3-VH1-Fc. In some aspects, the first polypeptide has a structure represented by VL1-VL2-VH2-VH1-Fc and the second polypeptide has a structure represented by VL1-L1-VL2-L2-VH2-L3-VH1-L4-Fc. In some aspects, the first polypeptide has a structure represented by VL1-L1-VL2-L2-VH2-L3-VH1-Fc and the second polypeptide has a structure represented by Fc. In some aspects, the first polypeptide has a structure represented by VL1-L1-VL2-L2-VH2-L3-VH1-Fc and the second polypeptide has a structure represented by VL1-VL2-VH2-VH1-Fc. In some aspects, the first polypeptide has a structure represented by VL1-L1-VL2-L2-VH2-L3-VH1-Fc and the second polypeptide has a structure represented by VL1-L1-VL2-L2-VH2-L3-VH1-Fc. In some aspects, the first polypeptide has a structure represented by VL1-L1-VL2-L2-VH2-L3-VH1-Fc and the second polypeptide has a structure represented by VL1-L1-VL2-L2-VH2-L3-VH1-L4-Fc. In some aspects, the first polypeptide has a structure represented by VL1-L1-VL2-L2-VH2-L3-VH1-L4-Fc and the second polypeptide has a structure represented by Fc. In some aspects, the first polypeptide has a structure represented by VL1-L1-VL2-L2-VH2-L3-VH1-L4-Fc and the second polypeptide has a structure represented by VL1-VL2-VH2-VH1-Fc. In some aspects, the first polypeptide has a structure represented by VL1-L1-VL2-L2-VH2-L3-VH1-L4-Fc and the second polypeptide has a structure represented by VL1-L1-VL2-L2-VH2-L3-VH1-Fc. In some aspects, the first polypeptide has a structure represented by VL1-L1-VL2-L2-VH2-L3-VH1-L4-Fc and the second polypeptide has a structure represented by VL1-L1-VL2-L2-VH2-L3-VH1-L4-Fc. In some aspects, the first polypeptide comprises a VH1 comprising an amino acid sequence having at least 90% identity to SEQ ID NO: 25; a VH2 comprising an amino acid sequence having at least 90% identity to SEQ ID NO:24; a VL1 comprising an amino acid sequence having at least 90% identity to SEQ ID NO: 31; and a VL2 comprising an amino acid sequence having at least 90% identity to SEQ ID NO:30; and the second polypeptide comprises a VH1 comprising an amino acid sequence having at least 90% identity to SEQ ID NO: 24; a VH2 comprising an amino acid sequence having at least 90% identity to SEQ ID NO:25; a VL1 comprising an amino acid sequence having at least 90% identity to SEQ ID NO: 30; and a VL2 comprising an amino acid sequence having at least 90% identity to SEQ ID NO:31. At least 90% identity may include at least 91%, 92%, 93%, 94%, 95%, 96%, 97%, 98%, 99% or 100% identity to the reference polypeptide sequence. For example, the first polypeptide may comprise a VH1 comprising the amino acid sequence of SEQ ID NO:25; a VH2 comprising the amino acid sequence of SEQ ID NO:24; a VL1 comprising the amino acid sequence of SEQ ID NO:31; and a VL2 comprising the amino acid sequence of SEQ ID NO: 30, and the second polypeptide may comprise a VH1 comprising the amino acid sequence of SEQ ID NO:24; a VH2 comprising the amino acid sequence of SEQ ID NO:25; a VL1 comprising the amino acid sequence of SEQ ID NO:30; and a VL2 comprising the amino acid sequence of SEQ ID NO: 31. In some aspects, the first polypeptide comprises an amino acid sequence having at least 90% identity, at least 95% identity, or 100% identity to SEQ ID NO:36 or 37, and the second polypeptide comprises an amino acid sequence having at least 90% identity, at least 95% identity, or 100% identity to SEQ ID NO:34 or 35. In some aspects, the first polypeptide may comprise an amino acid sequence having at least 90% identity to SEQ ID NO:36 or 37 and the second polypeptide may comprise an amino acid sequence having at least 90% identity to SEQ ID NO: 34 or 35. At least 90% identity may include at least 91%, 92%, 93%, 94%, 95%, 96%, 97%, 98%, 99% or 100% identity to the reference polypeptide sequence. In some aspects, the first polypeptide may comprise the amino acid sequence of SEQ ID NO:36 or 37; and the second polypeptide may comprise the amino acid sequence of SEQ ID NO: 34 or 35. For example, the first polypeptide may comprise the amino acid sequence of SEQ ID NO: 36 and the second polypeptide may comprise the amino acid sequence of SEQ ID NO: 34. For example, the first polypeptide may comprise the amino acid sequence of SEQ ID NO: 36 and the second polypeptide may comprise the amino acid sequence of SEQ ID NO: 35. For example, the first polypeptide may comprise the amino acid sequence of SEQ ID NO: 37 and the second polypeptide may comprise the amino acid sequence of SEQ ID NO: 34. For example, the first polypeptide may comprise the amino acid sequence of SEQ ID NO: 37 and the second polypeptide may comprise the amino acid sequence of SEQ ID NO: 35.

[0205] In yet other aspects, the invention is directed to antigen binding polypeptide complexes having a first polypeptide and a second polypeptide, wherein the first polypeptide has a structure represented by VL1-VL2-VH2-VH1 or VH1-VH2-VL2-VL1, and the second polypeptide has a structure represented by VL3-VL4-VH4-VH3 or VH3-VH4-VL4-VL3. In some aspects, the first polypeptide has a structure represented by VL1-VL2-VH2-VH1 and the second polypeptide has a structure represented by VL3-VL4-VH4-VH3. In some aspects, the first polypeptide has a structure represented by VL1-VL2-VH2-VH1 and the second polypeptide has a structure represented by VH3-VH4-VL4-VL3. In some aspects, the first polypeptide has a structure represented by VH1-VH2-VL2-VL1 and the second polypeptide has a structure represented by VL3-VL4-VH4-VH3. In some aspects, the first polypeptide has a structure represented by VH1-VH2-VL2-VL1 and the second polypeptide has a structure represented by VH3-VH4-VL4-VL3. In some aspects, the antigen binding polypeptide complex contains an amino acid linker between any two regions denoted in a structure described herein. In some aspects, the antigen binding polypeptide complex can contain an Fc region, CH1 region, CL region, and/or CH3 or any combination thereof. In some aspects, the Fc region, CH1 region, CL region and/or CH3 is located at the carboxy terminus of the antigen binding polypeptide, and is optionally linked to polypeptide by at least one amino acid linker. In some aspects, the Fc region comprises an amino acid sequence of any one of SEQ ID NOs:391-404, or an amino acid sequence having at least 80%, at least 85%, at least 90%, at least 95%, at least 96%, at least 97%, at least 98%, or at least 99% identity to any one of SEQ ID NOs:391-404. In some aspects, the CH1 region comprises an amino acid sequence of any one of SEQ ID NOs:405-409 or an amino acid sequence having at least 80%, at least 85%, at least 90%, at least 95%, at least 96%, at least 97%, at least 98%, or at least 99% identity to any one of SEQ ID NOs:405-409. In some aspects, the CL region comprises an amino acid sequence of SEQ ID NO:420 or 421, or an amino acid sequence having at least 80%, at least 85%, at least 90%, at least 95%, at least 96%, at least 97%, at least 98% or at least 99% identity to SEQ ID NO:420 or 421. In some aspects, the antigen binding polypeptide complex is an antibody or antigen binding fragment thereof.

[0206] In some aspects, the antigen binding polypeptide and antigen binding polypeptide complex of the invention specifically bind to an HIV protein. The HIV protein specifically bound by the antigen binding polypeptide and antigen binding polypeptide complex of the invention may be selected from: Env, gp160, gp120, gp41, p17, p24, p7, p55, p66, p31, Nef, Tat, Rev, Vif, Vpr and Vpu. In some aspects, the antigen binding polypeptide or antigen binding polypeptide complex specifically binds at least one epitope on at least HIV protein selected from: Env, gp160, gp120, gp41, p17, p24, p7, p55, p66, p31, Nef, Tat, Rev, Vif, Vpr and Vpu. In some aspects, the antigen binding polypeptide or polypeptide comprised within the antigen binding complex may comprise a VL1, VL2, VL3, VL4, VH1, VH2, VH3, and/or VH4 that specifically binds to one or more of: Env, gp160, gp120, gp41, p17, p24, p7, p55, p66, p31, Nef, Tat, Rev, Vif, Vpr and Vpu. For example, the antigen binding polypeptide or polypeptide comprised within the antigen binding complex may comprise a VL1 that specifically binds to Env, gp160, gp120, gp41, p17, p24, p7, p55, p66, p31, Nef, Tat, Rev, Vif, Vpr and Vpu. For example, the VL1 may specifically bind to Env. For example, the VL1 may specifically bind to gp160. For example, the VL1 may specifically bind to gp120. For example, the VL1 may specifically bind to gp41. For example, the VL1 may specifically bind to p17. For example, the VL1 may specifically bind to p24. For example, the VL1 may specifically bind to p7. For example, the VL1 may specifically bind to p55. For example, the VL1 may specifically bind to p66. For example, the VL1 may specifically bind to p31. For example, the VL1 may specifically bind to Nef. For example, the VL1 may specifically bind to Tat. For example, the VL1 may specifically bind to Rev. For example, the VL1 may specifically bind to Vif. For example, the VL1 may specifically bind to Vpr. or example, the VL1 may specifically bind to Vpu. For example, the antigen binding polypeptide or polypeptide comprised within the antigen binding complex may comprise a VL2 that specifically binds to Env, gp160, gp120, gp41, p17, p24, p7, p55, p66, p31, Nef, Tat, Rev, Vif, Vpr and Vpu. For example, the VL2 may specifically bind to Env. For example, the VL2 may specifically bind to gp160. For example, the VL2 may specifically bind to gp120. For example, the VL2 may specifically bind to gp41. For example, the VL2 may specifically bind to p17. For example, the VL2 may specifically bind to p24. For example, the VL2 may specifically bind to p7. For example, the VL2 may specifically bind to p55. For example, the VL2 may specifically bind to p66. For example, the VL2 may specifically bind to p31. For example, the VL2 may specifically bind to Nef. For example, the VL2 may specifically bind to Tat. For example, the VL2 may specifically bind to Rev. For example, the VL2 may specifically bind to Vif. For example, the VL2 may specifically bind to Vpr. or example, the VL2 may specifically bind to Vpu. For example, the antigen binding polypeptide or polypeptide comprised within the antigen binding complex may comprise a VL3 that specifically binds to Env, gp160, gp120, gp41, p17, p24, p7, p55, p66, p31, Nef, Tat, Rev, Vif, Vpr and Vpu. For example, the VL3 may specifically bind to Env. For example, the VL3 may specifically bind to gp160. For example, the VL3 may specifically bind to gp120. For example, the VL3 may specifically bind to gp41. For example, the VL3 may specifically bind to p17. For example, the VL3 may specifically bind to p24. For example, the VL3 may specifically bind to p7. For example, the VL3 may specifically bind to p55. For example, the VL3 may specifically bind to p66. For example, the VL3 may specifically bind to p31. For example, the VL3 may specifically bind to Nef. For example, the VL3 may specifically bind to Tat. For example, the VL3 may specifically bind to Rev. For example, the VL3 may specifically bind to Vif. For example, the VL3 may specifically bind to Vpr. or example, the VL3 may specifically bind to Vpu. For example, the antigen binding polypeptide or polypeptide comprised within the antigen binding complex may comprise a VL4 that specifically binds to Env, gp160, gp120, gp41, p17, p24, p7, p55, p66, p31, Nef, Tat, Rev, Vif, Vpr and Vpu. For example, the VL4 may specifically bind to Env. For example, the VL4 may specifically bind to gp160. For example, the VL4 may specifically bind to gp120. For example, the VL4 may specifically bind to gp41. For example, the VL4 may specifically bind to p17. For example, the VL4 may specifically bind to p24. For example, the VL4 may specifically bind to p7. For example, the VL4 may specifically bind to p55. For example, the VL4 may specifically bind to p66. For example, the VL4 may specifically bind to p31. For example, the VL4 may specifically bind to Nef. For example, the VL4 may specifically bind to Tat. For example, the VL4 may specifically bind to Rev. For example, the VL4 may specifically bind to Vif. For example, the VL4 may specifically bind to Vpr. or example, the VL4 may specifically bind to Vpu. For example, the antigen binding polypeptide or polypeptide comprised within the antigen binding complex may comprise a VH1 that specifically binds to Env, gp160, gp120, gp41, p17, p24, p7, p55, p66, p31, Nef, Tat, Rev, Vif, Vpr and Vpu. For example, the VH1 may specifically bind to Env. For example, the VH1 may specifically bind to gp160. For example, the VH1 may specifically bind to gp120. For example, the VH1 may specifically bind to gp41. For example, the VH1 may specifically bind to p17. For example, the VH1 may specifically bind to p24. For example, the VH1 may specifically bind to p7. For example, the VH1 may specifically bind to p55. For example, the VH1 may specifically bind to p66. For example, the VH1 may specifically bind to p31. For example, the VH1 may specifically bind to Nef. For example, the VH1 may specifically bind to Tat. For example, the VH1 may specifically bind to Rev. For example, the VH1 may specifically bind to Vif. For example, the VH1 may specifically bind to Vpr. or example, the VH1 may specifically bind to Vpu. For example, the antigen binding polypeptide or polypeptide comprised within the antigen binding complex may comprise a VH2 that specifically binds to Env, gp160, gp120, gp41, p17, p24, p7, p55, p66, p31, Nef, Tat, Rev, Vif, Vpr and Vpu. For example, the VH2 may specifically bind to Env. For example, the VH2 may specifically bind to gp160. For example, the VH2 may specifically bind to gp120. For example, the VH2 may specifically bind to gp41. For example, the VH2 may specifically bind to p17. For example, the VH2 may specifically bind to p24. For example, the VH2 may specifically bind to p7. For example, the VH2 may specifically bind to p55. For example, the VH2 may specifically bind to p66. For example, the VH2 may specifically bind to p31. For example, the VH2 may specifically bind to Nef. For example, the VH2 may specifically bind to Tat. For example, the VH2 may specifically bind to Rev. For example, the VH2 may specifically bind to Vif. For example, the VH2 may specifically bind to Vpr. or example, the VH2 may specifically bind to Vpu. For example, the antigen binding polypeptide or polypeptide comprised within the antigen binding complex may comprise a VH3 that specifically binds to Env, gp160, gp120, gp41, p17, p24, p7, p55, p66, p31, Nef, Tat, Rev, Vif, Vpr and Vpu. For example, the VH3 may specifically bind to Env. For example, the VH3 may specifically bind to gp160. For example, the VH3 may specifically bind to gp120. For example, the VH3 may specifically bind to gp41. For example, the VH3 may specifically bind to p17. For example, the VH3 may specifically bind to p24. For example, the VH3 may specifically bind to p7. For example, the VH3 may specifically bind to p55. For example, the VH3 may specifically bind to p66. For example, the VH3 may specifically bind to p31. For example, the VH3 may specifically bind to Nef. For example, the VH3 may specifically bind to Tat. For example, the VH3 may specifically bind to Rev. For example, the VH3 may specifically bind to Vif. For example, the VH3 may specifically bind to Vpr. or example, the VH3 may specifically bind to Vpu. For example, the antigen binding polypeptide or polypeptide comprised within the antigen binding complex may comprise a VH4 that specifically binds to Env, gp160, gp120, gp41, p17, p24, p7, p55, p66, p31, Nef, Tat, Rev, Vif, Vpr and Vpu. For example, the VH4 may specifically bind to Env. For example, the VH4 may specifically bind to gp160. For example, the VH4 may specifically bind to gp120. For example, the VH4 may specifically bind to gp41. For example, the VH4 may specifically bind to p17. For example, the VH4 may specifically bind to p24. For example, the VH4 may specifically bind to p7. For example, the VH4 may specifically bind to p55. For example, the VH4 may specifically bind to p66. For example, the VH4 may specifically bind to p31. For example, the VH4 may specifically bind to Nef. For example, the VH4 may specifically bind to Tat. For example, the VH4 may specifically bind to Rev. For example, the VH4 may specifically bind to Vif. For example, the VH4 may specifically bind to Vpr. or example, the VH4 may specifically bind to Vpu. Any of the antigen binding polypeptide structures and any of the antigen binding polypeptide complex structures described herein may be used to target one or more of the HIV proteins described herein.

[0207] In some aspects, the invention is directed to an antigen binding polypeptide complex comprising a first polypeptide and a second polypeptide; wherein the first polypeptide has a structure represented by VL1-VL2-VH2-VH1; VH1-VH2-VL2-VL1; VL1-L1-VL2-L2-VH2-L3-VH1; or VH1-L1-VH2-L2-VL2-L3-VL1; wherein the second polypeptide has a structure represented by VL3-VL4-VH4-VH3; VH3-VH4-VL4-VL3; VL3-L4-VL4-L5-VH4-L6-VH3; or VH3-L4-VH4-L5-VL4-L6-VL3; wherein VL1 is a first immunoglobulin light chain variable region; VL2 is a second immunoglobulin light chain variable region; VL3 is a third immunoglobulin light chain variable region; VL4 is a fourth immunoglobulin light chain variable region; VH1 is a first immunoglobulin heavy chain variable region; VH2 is a second immunoglobulin heavy chain variable region; VH3 is a third immunoglobulin heavy chain variable region; VH4 is a fourth immunoglobulin heavy chain variable region; and L1, L2, L3, L4, L5 and L6 are amino acid linkers. In some aspects, the first polypeptide has a structure represented by VL1-VL2-VH2-VH1, and the second polypeptide has a structure represented by VL3-VL4-VH4-VH3; VH3-VH4-VL4-VL3; VL3-L4-VL4-L5-VH4-L6-VH3; or VH3-L4-VH4-L5-VL4-L6-VL3. In some aspects, the first polypeptide has a structure represented by VH1-VH2-VL2-VL1, and the second polypeptide has a structure represented by VL3-VL4-VH4-VH3; VH3-VH4-VL4-VL3; VL3-L4-VL4-L5-VH4-L6-VH3; or VH3-L4-VH4-L5-VL4-L6-VL3. In some aspects, the first polypeptide has a structure represented by VL1-L1-VL2-L2-VH2-L3-VH1, and the second polypeptide has a structure represented by VL3-VL4-VH4-VH3; VH3-VH4-VL4-VL3; VL3-L4-VL4-L5-VH4-L6-VH3; or VH3-L4-VH4-L5-VL4-L6-VL3. In some aspects, the first polypeptide has a structure represented by VH1-L1-VH2-L2-VL2-L3-VL1, and the second polypeptide has a structure represented by VL3-VL4-VH4-VH3; VH3-VH4-VL4-VL3; VL3-L4-VL4-L5-VH4-L6-VH3; or VH3-L4-VH4-L5-VL4-L6-VL3.

[0208] In other aspects, the invention is directed to an antigen binding polypeptide complex comprising a first polypeptide and a second polypeptide; wherein the first polypeptide has a structure represented by VL1-VL2-VH2-VH1-Fc; VH1-VH2-VL2-VL1-Fc; VL1-L1-VL2-L2-VH2-L3-VH1-Fc; VH1-L1-VH2-L2-VL2-L3-VL1-Fc; VL1-L1-VL2-L2-VH2-L3-VH1-L4-Fc; or VH1-L1-VH2-L2-VL2-L3-VL1-L4-Fc; wherein the second polypeptide has a structure represented by VL3-VL4-VH4-VH3-Fe; VH3-VH4-VL4-VL3-Fc; VL3-L5-VL4-L6-VH4-L7-VH3-Fc; VH3-L5-VH4-L6-VL4-L7-VL3-Fc; VL3-L5-VL4-L6-VH4-L7-VH3-L8-Fc; or VH3-L5-VH4-L6-VL4-L7-VL3-L8-Fc; wherein VL1 is a first immunoglobulin light chain variable region; VL2 is a second immunoglobulin light chain variable region; VL3 is a third immunoglobulin light chain variable region; VL4 is a fourth immunoglobulin light chain variable region; VH1 is a first immunoglobulin heavy chain variable region; VH2 is a second immunoglobulin heavy chain variable region; VH3 is a third immunoglobulin heavy chain variable region; VH4 is a fourth immunoglobulin heavy chain variable region; Fc is a region comprising an immunoglobulin heavy chain constant region 2 (CH2), an immunoglobulin heavy chain constant region 3 (CH3), and optionally, an immunoglobulin hinge; and L1, L2, L3, L4, L5, L6, L7 and L8 are amino acid linkers. In some aspects, the first polypeptide has a structure represented by VL1-VL2-VH2-VH1-Fc and the second polypeptide has a structure represented by VL3-VL4-VH4-VH3-Fc; VH3-VH4-VL4-VL3-Fc; VL3-L5-VL4-L6-VH4-L7-VH3-Fc; VH3-L5-VH4-L6-VL4-L7-VL3-Fc; VL3-L5-VL4-L6-VH4-L7-VH3-L8-Fc; or VH3-L5-VH4-L6-VL4-L7-VL3-L8-Fe. In some aspects, the first polypeptide has a structure represented by VH1-VH2-VL2-VL1-Fc and the second polypeptide has a structure represented by VL3-VL4-VH4-VH3-Fc; VH3-VH4-VL4-VL3-Fc; VL3-L5-VL4-L6-VH4-L7-VH3-Fc; VH3-L5-VH4-L6-VL4-L7-VL3-Fc; VL3-L5-VL4-L6-VH4-L7-VH3-L8-Fc; or VH3-L5-VH4-L6-VL4-L7-VL3-L8-Fc. In some aspects, the first polypeptide has a structure represented by VL1-L1-VL2-L2-VH2-L3-VH1-Fe and the second polypeptide has a structure represented by VL3-VL4-VH4-VH3-Fc; VH3-VH4-VL4-VL3-Fc; VL3-L5-VL4-L6-VH4-L7-VH3-Fc; VH3-L5-VH4-L6-VL4-L7-VL3-Fc; VL3-L5-VL4-L6-VH4-L7-VH3-L8-Fc; or VH3-L5-VH4-L6-VL4-L7-VL3-L8-Fe. In some aspects, the first polypeptide has a structure represented by VH1-L1-VH2-L2-VL2-L3-VL1-Fc and the second polypeptide has a structure represented by VL3-VL4-VH4-VH3-Fc; VH3-VH4-VL4-VL3-Fc; VL3-L5-VL4-L6-VH4-L7-VH3-Fc; VH3-L5-VH4-L6-VL4-L7-VL3-Fc; VL3-L5-VL4-L6-VH4-L7-VH3-L8-Fc; or VH3-L5-VH4-L6-VL4-L7-VL3-L8-Fc. In some aspects, the first polypeptide has a structure represented by VL1-L1-VL2-L2-VH2-L3-VH1-L4-Fc and the second polypeptide has a structure represented by VL3-VL4-VH4-VH3-Fc; VH3-VH4-VL4-VL3-Fe; VL3-L5-VL4-L6-VH4-L7-VH3-Fc; VH3-L5-VH4-L6-VL4-L7-VL3-Fc; VL3-L5-VL4-L6-VH4-L7-VH3-L8-Fe; or VH3-L5-VH4-L6-VL4-L7-VL3-L8-Fc. In some aspects, the first polypeptide has a structure represented by VH1-L1-VH2-L2-VL2-L3-VL1-L4-Fc and the second polypeptide has a structure represented by VL3-VL4-VH4-VH3-Fc; VH3-VH4-VL4-VL3-Fc; VL3-L5-VL4-L6-VH4-L7-VH3-Fc; VH3-L5-VH4-L6-VL4-L7-VL3-Fc; VL3-L5-VL4-L6-VH4-L7-VH3-L8-Fc; or VH3-L5-VH4-L6-VL4-L7-VL3-L8-Fe.

[0209] In other aspects, the invention is directed to an antigen binding polypeptide complex comprising a first polypeptide and a second polypeptide; wherein the first polypeptide has a structure represented by VL1-VL2-VH2-VH1-CH1; VH1-VH2-VL2-VL1-CH1; VL1-VL2-VH2-VH1-CL; VH1-VH2-VL2-VL1-CL; VL1-VL2-VH2-VH1-CH1-CL; VH1-VH2-VL2-VL1-CH1-CL; VL1-VL2-VH2-VH1-CL-CH1; VH1-VH2-VL2-VL1-CL-CH1; VL1-L1-VL2-L2-VH2-L3-VH1-L4-CH1; VH1-L1-VH2-L2-VL2-L3-VL1-L4-CH1; VL1-L1-VL2-L2-VH2-L3-VH1-L4-CL; VH1-L1- VH2-L2-VL2-L3-VL1-L4-CL; VL1-L1-VL2-L2-VH2-L3-VH1-L4-CH1-L5-CL; VH1-L1-VH2-L2-VL2-L3-VL1-L4-CH1- L5-CL; VL1-L1-VL2-L2-VH2-L3-VH1-L4-CL-L5-CH1; or VH1-L1-VH2-L2-VL2-L3-VL1-L4-CL-L5-CH1; wherein the second polypeptide has a structure represented by VL3-VL4-VH4-VH3-CH1; VH3-VH4-VL4-VL3-CH1; VL3-VL4-VH4-VH3-CL; VH3-VH4-VL4-VL3-CL; VL3-VL4-VH4-VH3-CH1-CL; VH3-VH4-VL4-VL3-CH1-CL; VL3-VL4-VH4-VH3-CL-CH1; VH3-VH4-VL4-VL3-CL-CH1; VL3-L6-VL4-L7-VH4-L8-VH3-L9-CH1; VH3-L6-VH4-L7-VL4-L8-VL3-L9-CH1; VL3-L6-VL4-L7-VH4-L8-VH3-L9-CL; VH3-L6-VH4-L7-VL4-L8-VL3-L9-CL; VL3-L6-VL4- L7-VH4-L8-VH3-L9-CH1-L10-CL; VH3-L6-VH4-L7-VL4-L8-VL3-L9-CH1-L10-CL; VL3-L6-VL4-L7-VH4-L8-VH3-L9-CL-L10-CH1; or VH3-L6-VH4-L7-VL4-L8-VL3-L9-CL-L10-CH1; wherein VL1 is a first immunoglobulin light chain variable region; VL2 is a second immunoglobulin light chain variable region; VL3 is a third immunoglobulin light chain variable region; VL4 is a fourth immunoglobulin light chain variable region; VH1 is a first immunoglobulin heavy chain variable region; VH2 is a second immunoglobulin heavy chain variable region; VH3 is a third immunoglobulin heavy chain variable region; VH4 is a fourth immunoglobulin heavy chain variable region; CH1 is an immunoglobulin heavy chain constant region 1; CL is an immunoglobulin light chain constant region; and L1, L2, L3, L4, L5, L6, L7, L8, L9 and L10 are amino acid linkers. In some aspects, the first polypeptide has a structure represented by VL1-VL2-VH2-VH1-CH1 and the second polypeptide has a structure represented by VL3-VL4-VH4-VH3-CH1; VH3-VH4-VL4-VL3-CH1; VL3-VL4-VH4-VH3-CL; VH3-VH4-VL4-VL3-CL; VL3-VL4-VH4-VH3-CH1-CL; VH3-VH4-VL4-VL3-CH1-CL; VL3-VL4-VH4-VH3-CL-CH1; VH3-VH4-VL4-VL3-CL-CH1; VL3-L6-VL4-L7-VH4-L8-VH3-L9-CH1; VH3-L6-VH4-L7-VL4-L8-VL3-L9-CH1; VL3-L6-VL4-L7-VH4-L8-VH3-L9-CL; VH3-L6-VH4-L7-VL4-L8-VL3-L9-CL; VL3-L6-VL4-L7-VH4-L8-VH3-L9-CH1-L10-CL; VH3-L6-VH4-L7-VL4-L8-VL3-L9-CH1-L10-CL; VL3-L6-VL4-L7- VH4-L8-VH3-L9-CL-L10-CH1; or VH3-L6-VH4-L7-VL4-L8-VL3-L9-CL-L10-CH1. In some aspects, the first polypeptide has a structure represented by VH1-VH2-VL2-VL1-CH1 and the second polypeptide has a structure represented by VL3-VL4-VH4-VH3-CH1; VH3-VH4-VL4-VL3-CH1; VL3-VL4-VH4-VH3-CL; VH3-VH4-VL4-VL3-CL; VL3-VL4-VH4-VH3-CH1-CL; VH3-VH4-VL4-VL3-CH1-CL; VL3-VL4-VH4-VH3-CL-CH1; VH3-VH4-VL4-VL3-CL-CH1; VL3-L6-VL4-L7-VH4-L8-VH3-L9-CH1; VH3-L6-VH4-L7-VL4-L8-VL3-L9-CH1; VL3-L6-VL4-L7-VH4-L8-VH3-L9-CL; VH3-L6-VH4-L7-VL4-L8-VL3-L9-CL; VL3-L6-VL4-L7-VH4-L8-VH3-L9-CH1-L10-CL; VH3-L6-VH4-L7-VL4-L8-VL3-L9-CH1-L10-CL; VL3-L6-VL4-L7-VH4-L8-VH3-L9-CL-L10-CH1; or VH3-L6-VH4-L7-VL4-L8-VL3-L9-CL-L10-CH1. In some aspects, the first polypeptide has a structure represented by VL1-VL2-VH2-VH1-CL and the second polypeptide has a structure represented by VL3-VL4-VH4-VH3-CH1; VH3-VH4-VL4-VL3-CH1; VL3-VL4-VH4-VH3-CL; VH3-VH4-VL4-VL3-CL; VL3-VL4-VH4-VH3-CH1-CL; VH3-VH4-VL4-VL3-CH1-CL; VL3-VL4-VH4-VH3-CL-CH1; VH3-VH4-VL4-VL3-CL-CH1; VL3-L6-VL4-L7-VH4-L8-VH3-L9-CH1; VH3-L6-VH4-L7-VL4-L8-VL3-L9-CH1; VL3-L6-VL4-L7-VH4-L8-VH3-L9-CL; VH3-L6-VH4-L7-VL4-L8-VL3-L9-CL; VL3-L6-VL4- L7-VH4-L8-VH3-L9-CH1-L10-CL; VH3-L6-VH4-L7-VL4-L8-VL3-L9-CH1-L10-CL; VL3-L6-VL4-L7-VH4-L8-VH3-L9-CL-L10-CH1; or VH3-L6-VH4-L7-VL4-L8-VL3-L9-CL-L10-CH1. In some aspects, the first polypeptide has a structure represented by VH1-VH2-VL2-VL1-CL and the second polypeptide has a structure represented by VL3-VL4-VH4-VH3-CH1; VH3-VH4-VL4-VL3-CH1; VL3-VL4-VH4-VH3-CL; VH3-VH4-VL4-VL3-CL; VL3-VL4-VH4-VH3-CH1-CL; VH3-VH4-VL4-VL3-CH1-CL; VL3-VL4-VH4-VH3-CL-CH1; VH3-VH4-VL4-VL3-CL-CH1; VL3-L6-VL4-L7-VH4-L8-VH3-L9-CH1; VH3-L6-VH4-L7-VL4-L8-VL3-L9-CH1; VL3-L6-VL4-L7-VH4-L8-VH3-L9-CL; VH3-L6-VH4-L7-VL4-L8-VL3-L9-CL; VL3-L6-VL4-L7-VH4-L8-VH3-L9-CH1-L10-CL; VH3-L6-VH4-L7-VL4-L8-VL3- L9-CH1-L10-CL; VL3-L6-VL4-L7-VH4-L8-VH3-L9-CL-L10-CH1; or VH3-L6-VH4-L7-VL4-L8-VL3-L9-CL-L10-CH1. In some aspects, the first polypeptide has a structure represented by VL1-VL2-VH2-VH1-CH1-CL and the second polypeptide has a structure represented by VL3-VL4-VH4-VH3-CH1; VH3-VH4-VL4-VL3-CH1; VL3-VL4-VH4-VH3-CL; VH3-VH4-VL4-VL3-CL; VL3-VL4-VH4-VH3-CH1-CL; VH3-VH4-VL4-VL3-CH1-CL; VL3-VL4-VH4-VH3-CL-CH1; VH3-VH4-VL4-VL3-CL-CH1; VL3-L6-VL4-L7-VH4-L8-VH3-L9-CH1; VH3-L6-VH4-L7-VL4-L8-VL3-L9-CH1; VL3-L6-VL4-L7-VH4-L8-VH3-L9-CL; VH3-L6-VH4-L7-VL4-L8-VL3-L9-CL; VL3-L6-VL4-L7-VH4- L8-VH3-L9-CH1-L10-CL; VH3-L6-VH4-L7-VL4-L8-VL3-L9-CH1-L10-CL; VL3-L6-VL4-L7-VH4-L8-VH3-L9-CL-L10-CH1; or VH3-L6-VH4-L7-VL4-L8-VL3-L9-CL-L10-CH1. In some aspects, the first polypeptide has a structure represented by VH1-VH2-VL2-VL1-CH1-CL and the second polypeptide has a structure represented by VL3-VL4-VH4-VH3-CH1; VH3-VH4-VL4-VL3-CH1; VL3-VL4-VH4-VH3-CL; VH3-VH4-VL4-VL3-CL; VL3-VL4-VH4-VH3-CH1-CL; VH3-VH4-VL4-VL3-CH1-CL; VL3-VL4-VH4-VH3-CL-CH1; VH3-VH4-VL4-VL3-CL-CH1; VL3-L6-VL4-L7-VH4-L8-VH3-L9-CH1; VH3-L6-VH4-L7-VL4-L8-VL3-L9-CH1; VL3-L6-VL4-L7-VH4-L8-VH3-L9-CL; VH3-L6-VH4-L7-VL4-L8-VL3-L9-CL; VL3-L6-VL4-L7-VH4-L8-VH3-L9-CH1-L10-CL; VH3-L6-VH4-L7-VL4-L8-VL3- L9-CH1-L10-CL; VL3-L6-VL4-L7-VH4-L8-VH3-L9-CL-L10-CH1; or VH3-L6-VH4-L7-VL4-L8-VL3-L9-CL-L10-CH1. In some aspects, the first polypeptide has a structure represented by VL1-VL2-VH2-VH1-CL-CH1 and the second polypeptide has a structure represented by VL3-VL4-VH4-VH3-CH1; VH3-VH4-VL4-VL3-CH1; VL3-VL4-VH4-VH3-CL; VH3-VH4-VL4-VL3-CL; VL3-VL4-VH4-VH3-CH1-CL; VH3-VH4-VL4-VL3-CH1-CL; VL3-VL4-VH4-VH3-CL-CH1; VH3-VH4-VL4-VL3-CL-CH1; VL3-L6-VL4-L7-VH4-L8-VH3-L9-CH1; VH3-L6-VH4-L7-VL4-L8-VL3-L9-CH1; VL3-L6-VL4-L7-VH4-L8-VH3-L9-CL; VH3-L6-VH4-L7-VL4-L8-VL3-L9-CL; VL3-L6-VL4-L7-VH4- L8-VH3-L9-CH1-L10-CL; VH3-L6-VH4-L7-VL4-L8-VL3-L9-CH1-L10-CL; VL3-L6-VL4-L7-VH4-L8-VH3-L9-CL-L10-CH1; or VH3-L6-VH4-L7-VL4-L8-VL3-L9-CL-L10-CH1. In some aspects, the first polypeptide has a structure represented by VH1-VH2-VL2-VL1-CL-CH1 and the second polypeptide has a structure represented by VL3-VL4-VH4-VH3-CH1; VH3-VH4-VL4-VL3-CH1; VL3-VL4-VH4-VH3-CL; VH3-VH4-VL4-VL3-CL; VL3-VL4-VH4-VH3-CH1-CL; VH3-VH4-VL4-VL3-CH1-CL; VL3-VL4-VH4-VH3-CL-CH1; VH3-VH4-VL4-VL3-CL-CH1; VL3-L6-VL4-L7-VH4-L8-VH3-L9-CH1; VH3-L6-VH4-L7-VL4-L8-VL3-L9-CH1; VL3-L6-VL4-L7-VH4-L8-VH3-L9-CL; VH3-L6-VH4-L7-VL4-L8-VL3-L9-CL; VL3-L6-VL4-L7-VH4-L8-VH3-L9-CH1-L10-CL; VH3-L6-VH4-L7-VL4-L8-VL3- L9-CH1-L10-CL; VL3-L6-VL4-L7-VH4-L8-VH3-L9-CL-L10-CH1; or VH3-L6-VH4-L7-VL4-L8-VL3-L9-CL-L10-CH1. In some aspects, the first polypeptide has a structure represented by VL1-L1-VL2-L2-VH2-L3-VH1-L4-CH1 and the second polypeptide has a structure represented by VL3-VL4-VH4-VH3-CH1; VH3-VH4-VL4-VL3-CH1; VL3-VL4-VH4-VH3-CL; VH3-VH4-VL4-VL3-CL; VL3-VL4-VH4-VH3-CH1-CL; VH3-VH4-VL4-VL3-CH1-CL; VL3-VL4-VH4-VH3-CL-CH1; VH3-VH4-VL4-VL3-CL-CH1; VL3-L6-VL4-L7-VH4-L8-VH3-L9-CH1; VH3-L6-VH4-L7-VL4-L8-VL3-L9-CH1; VL3-L6-VL4-L7-VH4-L8-VH3-L9-CL; VH3-L6-VH4-L7-VL4-L8-VL3-L9-CL; VL3-L6-VL4- L7-VH4-L8-VH3-L9-CH1-L10-CL; VH3-L6-VH4-L7-VL4-L8-VL3-L9-CH1-L10-CL; VL3-L6-VL4-L7-VH4-L8-VH3-L9-CL-L10-CH1; or VH3-L6-VH4-L7-VL4-L8-VL3-L9-CL-L10-CH1. In some aspects, the first polypeptide has a structure represented by VH1-L1-VH2-L2-VL2-L3-VL1-L4-CH1 and the second polypeptide has a structure represented by VL3-VL4-VH4-VH3-CH1; VH3-VH4-VL4-VL3-CH1; VL3-VL4-VH4-VH3-CL; VH3-VH4-VL4-VL3-CL; VL3-VL4-VH4-VH3-CH1-CL; VH3-VH4-VL4-VL3-CH1-CL; VL3-VL4-VH4-VH3-CL-CH1; VH3-VH4-VL4-VL3-CL-CH1; VL3-L6-VL4-L7-VH4-L8-VH3-L9-CH1; VH3-L6-VH4-L7-VL4-L8-VL3-L9-CH1; VL3-L6-VL4-L7-VH4- L8-VH3-L9-CL; VH3-L6-VH4-L7-VL4-L8-VL3-L9-CL; VL3-L6-VL4-L7-VH4-L8-VH3-L9-CH1-L10-CL; VH3-L6-VH4-L7-VL4-L8-VL3-L9-CH1-L10-CL; VL3-L6-VL4-L7-VH4-L8-VH3-L9-CL-L10-CH1; or VH3-L6-VH4-L7-VL4-L8-VL3-L9-CL-L10-CH1. In some aspects, the first polypeptide has a structure represented by VL1-L1-VL2-L2-VH2-L3-VH1-L4-CL and the second polypeptide has a structure represented by VL3-VL4-VH4-VH3-CH1; VH3-VH4-VL4-VL3-CH1; VL3-VL4-VH4-VH3-CL; VH3-VH4-VL4-VL3-CL; VL3-VL4-VH4-VH3-CH1-CL; VH3-VH4-VL4-VL3-CH1-CL; VL3-VL4-VH4-VH3-CL-CH1; VH3-VH4-VL4-VL3-CL-CH1; VL3-L6-VL4-L7-VH4-L8-VH3-L9-CH1; VH3-L6-VH4-L7-VL4-L8-VL3-L9-CH1; VL3-L6-VL4-L7-VH4-L8-VH3-L9-CL; VH3-L6-VH4-L7-VL4-L8-VL3-L9-CL; VL3-L6-VL4-L7-VH4-L8-VH3-L9-CH1-L10-CL; VH3-L6-VH4-L7-VL4-L8-VL3-L9-CH1-L10-CL; VL3-L6-VL4-L7-VH4-L8-VH3-L9-CL-L10-CH1; or VH3-L6-VH4-L7-VL4-L8-VL3-L9-CL-L10-CH1. In some aspects, the first polypeptide has a structure represented by VH1-L1-VH2-L2-VL2-L3-VL1-L4-CL and the second polypeptide has a structure represented by VL3-VL4-VH4-VH3-CH1; VH3-VH4-VL4-VL3-CH1; VL3-VL4-VH4-VH3-CL; VH3-VH4-VL4-VL3-CL; VL3-VL4-VH4-VH3-CH1-CL; VH3-VH4-VL4-VL3-CH1-CL; VL3-VL4-VH4-VH3-CL-CH1; VH3-VH4-VL4-VL3-CL-CH1; VL3-L6-VL4-L7-VH4-L8-VH3-L9-CH1; VH3-L6-VH4-L7-VL4-L8-VL3-L9-CH1; VL3- L6-VL4-L7-VH4-L8-VH3-L9-CL; VH3-L6-VH4-L7-VL4-L8-VL3-L9-CL; VL3-L6-VL4-L7-VH4-L8-VH3-L9-CH1- L10-CL; VH3-L6-VH4-L7-VL4-L8-VL3-L9-CH1-L10-CL; VL3-L6-VL4-L7-VH4-L8-VH3-L9-CL-L10-CH1; or VH3-L6-VH4-L7-VL4-L8-VL3-L9-CL-L10-CH1. In some aspects, the first polypeptide has a structure represented by VL1-L1-VL2-L2-VH2-L3-VH1-L4-CH1-L5-CL and the second polypeptide has a structure represented by VL3-VL4-VH4-VH3-CH1; VH3-VH4-VL4-VL3-CH1; VL3-VL4-VH4-VH3-CL; VH3-VH4-VL4-VL3-CL; VL3-VL4-VH4-VH3-CH1-CL; VH3-VH4-VL4-VL3-CH1-CL; VL3-VL4-VH4-VH3-CL-CH1; VH3-VH4-VL4-VL3-CL-CH1; VL3-L6-VL4-L7-VH4-L8-VH3-L9-CH1; VH3-L6-VH4-L7-VL4-L8-VL3-L9-CH1; VL3-L6-VL4-L7-VH4-L8-VH3-L9-CL; VH3-L6- VH4-L7-VL4-L8-VL3-L9-CL; VL3-L6-VL4-L7-VH4-L8-VH3-L9-CH1-L10-CL; VH3-L6-VH4-L7-VL4-L8-VL3-L9-CH1- L10-CL; VL3-L6-VL4-L7-VH4-L8-VH3-L9-CL-L10-CH1; or VH3-L6-VH4-L7-VL4-L8-VL3-L9-CL-L10-CH1. In some aspects, the first polypeptide has a structure represented by VH1-L1-VH2-L2-VL2-L3-VL1-L4-CH1-L5-CL and the second polypeptide has a structure represented by VL3-VL4-VH4-VH3-CH1; VH3-VH4-VL4-VL3-CH1; VL3-VL4-VH4-VH3-CL; VH3-VH4-VL4-VL3-CL; VL3-VL4-VH4-VH3-CH1-CL; VH3-VH4-VL4-VL3-CH1-CL; VL3-VL4-VH4-VH3-CL-CH1; VH3-VH4-VL4-VL3-CL-CH1; VL3-L6-VL4-L7-VH4-L8-VH3-L9-CH1; VH3-L6-VH4-L7-VL4-L8-VL3-L9-CH1; VL3-L6-VL4-L7-VH4-L8-VH3-L9-CL; VH3-L6-VH4-L7-VL4-L8-VL3-L9-CL; VL3-L6-VL4- L7-VH4-L8-VH3-L9-CH1-L10-CL; VH3-L6-VH4-L7-VL4-L8-VL3-L9-CH1-L10-CL; VL3-L6-VL4-L7-VH4-L8-VH3-L9-CL-L10-CH1; or VH3-L6-VH4-L7-VL4-L8-VL3-L9-CL-L10-CH1. In some aspects, the first polypeptide has a structure represented by VL1-L1-VL2-L2-VH2-L3-VH1-L4-CL-L5-CH1 and the second polypeptide has a structure represented by VL3-VL4-VH4-VH3-CH1; VH3-VH4-VL4-VL3-CH1; VL3-VL4-VH4-VH3-CL; VH3-VH4-VL4-VL3-CL; VL3-VL4-VH4-VH3-CH1-CL; VH3-VH4-VL4-VL3-CH1-CL; VL3-VL4-VH4-VH3-CL-CH1; VH3-VH4-VL4-VL3-CL-CH1; VL3-L6-VL4-L7-VH4-L8-VH3-L9-CH1; VH3-L6-VH4-L7-VL4-L8-VL3-L9-CH1; VL3-L6-VL4- L7-VH4-L8-VH3-L9-CL; VH3-L6-VH4-L7-VL4-L8-VL3-L9-CL; VL3-L6-VL4-L7-VH4-L8-VH3-L9-CH1-L10-CL; VH3-L6-VH4-L7-VL4-L8-VL3-L9-CH1-L10-CL; VL3-L6-VL4-L7-VH4-L8-VH3-L9-CL-L10-CH1; or VH3-L6-VH4-L7-VL4-L8-VL3-L9-CL-L10-CH1. In some aspects, the first polypeptide has a structure represented by VH1-L1-VH2-L2-VL2-L3-VL1-L4-CL-L5-CH1 and the second polypeptide has a structure represented by VL3-VL4-VH4-VH3-CH1; VH3-VH4-VL4-VL3-CH1; VL3-VL4-VH4-VH3-CL; VH3-VH4-VL4-VL3-CL; VL3-VL4-VH4-VH3-CH1-CL; VH3-VH4-VL4-VL3-CH1-CL; VL3-VL4-VH4-VH3-CL-CH1; VH3-VH4-VL4-VL3-CL-CH1; VL3-L6-VL4-L7-VH4-L8-VH3-L9-CH1; VH3-L6-VH4-L7-VL4-L8-VL3-L9-CH1; VL3-L6-VL4-L7-VH4-L8-VH3-L9-CL; VH3-L6-VH4- L7-VL4-L8-VL3-L9-CL; VL3-L6-VL4-L7-VH4-L8-VH3-L9-CH1-L10-CL; VH3-L6-VH4-L7-VL4-L8-VL3-L9-CH1- L10-CL; VL3-L6-VL4-L7-VH4-L8-VH3-L9-CL-L10-CH1; or VH3-L6-VH4-L7-VL4-L8-VL3-L9-CL-L10-CH1.

[0210] In other aspects, the invention is directed to an antigen binding polypeptide complex comprising a first polypeptide and a second polypeptide; wherein the first polypeptide has a structure represented by VL1-VL2-VH2-VH1-CH1-Fc; VH1-VH2-VL2-VL1-CH1-Fc; VL1-VL2-VH2-VH1-CL-Fc; VH1-VH2-VL2-VL1-CL-Fc; VL1-VL2-VH2-VH1-CH1-CL-Fc; VH1-VH2-VL2-VL1-CH1-CL-Fe; VL1-VL2-VH2-VH1-CL-CH1-Fc; VH1-VH2-VL2-VL1-CL-CH1-Fc; VL1-L1-VL2-L2-VH2-L3-VH1-L4-CH1-Fc; VH1-L1-VH2-L2-VL2-L3-VL1-L4-CH1-Fe; VL1-L1-VL2-L2-VH2-L3-VH1-L4-CL-Fc; VH1-L1-VH2-L2-VL2-L3-VL1-L4-CL-Fc; VL1-L1-VL2-L2-VH2-L3-VH1-L4-CH1-L5-CL- Fe; VH1-L1-VH2-L2-VL2-L3-VL1-L4-CH1-L5-CL-Fe; VL1-L1-VL2-L2-VH2-L3-VH1-L4-CL-L5-CH1-Fc; or VH1-L1-VH2-L2-VL2-L3-VL1-L4-CL-L5-CH1-Fe; wherein the second polypeptide has a structure represented by VL3-VL4-VH4-VH3-CH1-Fc; VH3-VH4-VL4-VL3-CH1-Fc; VL3-VL4-VH4-VH3-CL-Fc; VH3-VH4-VL4-VL3-CL-Fc; VL3-VL4-VH4-VH3-CH1-CL-Fc; VH3-VH4-VL4-VL3-CH1-CL-Fc; VL3-VL4-VH4-VH3-CL-CH1-Fc; VH3-VH4-VL4-VL3-CL-CH1-Fc; VL3-L6-VL4-L7-VH4-L8-VH3-L9-CH1-Fc; VH3-L6-VH4-L7-VL4-L8-VL3-L9-CH1-Fc; VL3-L6-VL4-L7-VH4-L8-VH3-L9-CL-Fc; VH3-L6-VH4-L7-VL4-L8-VL3-L9-CL-Fc; VL3-L6-VL4-L7-VH4-L8-VH3-L9-CH1-L10-CL-Fc; VH3-L6-VH4-L7-VL4-L8-VL3-L9-CH1-L10-CL-Fe; VL3-L6-VL4-L7-VH4-L8-VH3-L9-CL-L10-CH1-Fe; or VH3-L6-VH4-L7-VL4-L8-VL3-L9-CL-L10-CH1-Fe; wherein VL1 is a first immunoglobulin light chain variable region; VL2 is a second immunoglobulin light chain variable region; VL3 is a third immunoglobulin light chain variable region; VL4 is a fourth immunoglobulin light chain variable region; VH1 is a first immunoglobulin heavy chain variable region; VH2 is a second immunoglobulin heavy chain variable region; VH3 is a third immunoglobulin heavy chain variable region; VH4 is a fourth immunoglobulin heavy chain variable region; Fc is a region comprising an immunoglobulin heavy chain constant region 2 (CH2), an immunoglobulin heavy chain constant region 3 (CH3), and optionally, an immunoglobulin hinge; CH1 is an immunoglobulin heavy chain constant region 1; CL is an immunoglobulin light chain constant region; and L1, L2, L3, L4, L5, L6, L7, L8, L9 and L10 are amino acid linkers. In some aspects, the first polypeptide has a structure represented by VL1-VL2-VH2-VH1-CH1-Fc; and the second polypeptide has a structure represented by VL3-VL4-VH4-VH3-CH1-F c; VH3-VH4-VL4-VL3-CH1-Fc; VL3-VL4-VH4-VH3-CL-Fc; VH3-VH4-VL4-VL3-CL-Fc; VL3-VL4-VH4-VH3-CH1-CL-Fc; VH3-VH4-VL4-VL3-CH1-CL-Fc; VL3-VL4-VH4-VH3-CL-CH1-Fc; VH3-VH4-VL4-VL3-CL-CH1-Fc; VL3-L6-VL4-L7-VH4-L8-VH3-L9-CH1-Fe; VH3-L6-VH4-L7-VL4-L8-VL3-L9-CH1-Fc; VL3-L6-VL4-L7-VH4-L8-VH3-L9-CL-Fc; VH3-L6-VH4-L7-VL4-L8-VL3-L9-CL-Fc; VL3-L6-VL4-L7-VH4-L8-VH3-L9-CH1-L10-CL-Fc; VH3-L6-VH4-L7-VL4-L8-VL3-L9-CH1-L10-CL-Fc; VL3-L6-VL4-L7-VH4-L8-VH3-L9-CL-L10-CH1-Fe; or VH3-L6-VH4-L7-VL4-L8-VL3-L9-CL-L10-CH1-Fe. In some aspects, the first polypeptide has a structure represented by VH1-VH2-VL2-VL1-CH1-Fc; and the second polypeptide has a structure represented by VL3-VL4-VH4-VH3-CH1-Fc; VH3-VH4-VL4-VL3-CH1-Fc; VL3-VL4-VH4-VH3-CL-Fc; VH3-VH4-VL4-VL3-CL-Fc; VL3-VL4-VH4-VH3-CH1-CL-Fc; VH3-VH4-VL4-VL3-CH1-CL-Fc; VL3-VL4-VH4-VH3-CL-CH1-Fc; VH3-VH4-VL4-VL3-CL-CH1-Fc; VL3-L6-VL4-L7-VH4-L8-VH3-L9-CH1-Fe; VH3-L6-VH4-L7-VL4-L8-VL3-L9-CH1-Fc; VL3-L6-VL4-L7-VH4-L8-VH3-L9-CL-Fc; VH3-L6-VH4-L7-VL4-L8-VL3-L9-CL-Fc; VL3-L6-VL4-L7-VH4-L8-VH3-L9-CH1-L10-CL-Fc; VH3-L6-VH4-L7-VL4-L8-VL3-L9-CH1-L10-CL-Fc; VL3-L6-VL4-L7-VH4-L8-VH3-L9-CL-L10-CH1-Fe; or VH3-L6-VH4-L7-VL4-L8-VL3-L9-CL-L10-CH1-Fe. In some aspects, the first polypeptide has a structure represented by VL1-VL2-VH2-VH1-CL-Fc; and the second polypeptide has a structure represented by VL3-VL4-VH4-VH3-CH1-Fc; VH3-VH4-VL4-VL3-CH1-Fc; VL3-VL4-VH4-VH3-CL-Fc; VH3-VH4-VL4-VL3-CL-Fc; VL3-VL4-VH4-VH3-CH1-CL-Fc; VH3-VH4-VL4-VL3-CH1-CL-Fc; VL3-VL4-VH4-VH3-CL-CH1-Fc; VH3-VH4-VL4-VL3-CL-CH1-Fc; VL3-L6-VL4-L7-VH4-L8-VH3-L9-CH1-Fe; VH3-L6-VH4-L7-VL4-L8-VL3-L9-CH1-Fc; VL3-L6-VL4-L7-VH4-L8-VH3-L9-CL-Fc; VH3-L6-VH4-L7-VL4-L8-VL3-L9-CL-Fc; VL3-L6-VL4-L7-VH4-L8-VH3-L9-CH1-L10-CL-Fc; VH3-L6-VH4-L7-VL4-L8-VL3-L9-CH1-L10-CL-Fc; VL3-L6-VL4-L7-VH4-L8-VH3-L9-CL-L10-CH1-Fe; or VH3-L6-VH4-L7-VL4-L8-VL3-L9-CL-L10-CH1-Fe. In some aspects, the first polypeptide has a structure represented by VH1-VH2-VL2-VL1-CL-Fc; and the second polypeptide has a structure represented by VL3-VL4-VH4-VH3-CH1-Fc; VH3-VH4-VL4-VL3-CH1-Fc; VL3-VL4-VH4-VH3-CL-Fc; VH3-VH4-VL4-VL3-CL-Fc; VL3-VL4-VH4-VH3-CH1-CL-Fc; VH3-VH4-VL4-VL3-CH1-CL-Fc; VL3-VL4-VH4-VH3-CL-CH1-Fc; VH3-VH4-VL4-VL3-CL-CH1-Fc; VL3-L6-VL4-L7-VH4-L8-VH3-L9-CH1-Fe; VH3-L6-VH4-L7-VL4-L8-VL3-L9-CH1-Fc; VL3-L6-VL4-L7-VH4-L8-VH3-L9-CL-Fc; VH3-L6-VH4-L7-VL4-L8-VL3-L9-CL-Fc; VL3-L6-VL4-L7-VH4-L8-VH3-L9-CH1-L10-CL-Fc; VH3-L6-VH4-L7-VL4-L8-VL3-L9-CH1-L10-CL-Fc; VL3-L6-VL4-L7-VH4-L8-VH3-L9-CL-L10-CH1-Fe; or VH3-L6-VH4-L7-VL4-L8-VL3-L9-CL-L10-CH1-Fe. In some aspects, the first polypeptide has a structure represented by VL1-VL2-VH2-VH1-CH1-CL-Fc; and the second polypeptide has a structure represented by VL3-VL4-VH4-VH3-CH1-Fc; VH3-VH4-VL4-VL3-CH1-Fc; VL3-VL4-VH4-VH3-CL-Fc; VH3-VH4-VL4-VL3-CL-Fc; VL3-VL4-VH4-VH3-CH1-CL-Fc; VH3-VH4-VL4-VL3-CH1-CL-Fc; VL3-VL4-VH4-VH3-CL-CH1-Fc; VH3-VH4-VL4-VL3-CL-CH1-Fc; VL3-L6-VL4-L7-VH4-L8-VH3-L9-CH1-Fe; VH3-L6-VH4-L7-VL4-L8-VL3-L9-CH1-Fc; VL3-L6-VL4-L7-VH4-L8-VH3-L9-CL-Fc; VH3-L6-VH4-L7-VL4-L8-VL3-L9-CL-Fc; VL3-L6-VL4-L7-VH4-L8-VH3-L9-CH1-L10-CL-Fc; VH3-L6-VH4-L7-VL4-L8-VL3-L9-CH1-L10-CL-Fc; VL3-L6-VL4-L7-VH4-L8-VH3-L9-CL-L10-CH1-Fe; or VH3-L6-VH4-L7-VL4-L8-VL3-L9-CL-L10-CH1-Fe. In some aspects, the first polypeptide has a structure represented by VH1-VH2-VL2-VL1-CH1-CL-Fc; and the second polypeptide has a structure represented by VL3-VL4-VH4-VH3-CH1-Fc; VH3-VH4-VL4-VL3-CH1-Fc; VL3-VL4-VH4-VH3-CL-Fc; VH3-VH4-VL4-VL3-CL-Fc; VL3-VL4-VH4-VH3-CH1-CL-Fc; VH3-VH4-VL4-VL3-CH1-CL-Fc; VL3-VL4-VH4-VH3-CL-CH1-Fc; VH3-VH4-VL4-VL3-CL-CH1-Fc; VL3-L6-VL4-L7-VH4-L8-VH3-L9-CH1-Fe; VH3-L6-VH4-L7-VL4-L8-VL3-L9-CH1-Fc; VL3-L6-VL4-L7-VH4-L8-VH3-L9-CL-Fc; VH3-L6-VH4-L7-VL4-L8-VL3-L9-CL-Fc; VL3-L6-VL4-L7-VH4-L8-VH3-L9-CH1-L10-CL-Fc; VH3-L6-VH4-L7-VL4-L8-VL3-L9-CH1-L10-CL-Fc; VL3-L6-VL4-L7-VH4-L8-VH3-L9-CL-L10-CH1-Fe; or VH3-L6-VH4-L7-VL4-L8-VL3-L9-CL-L10-CH1-Fe. In some aspects, the first polypeptide has a structure represented by VL1-VL2-VH2-VH1-CL-CH1-Fc; and the second polypeptide has a structure represented by VL3-VL4-VH4-VH3-CH1-Fc; VH3-VH4-VL4-VL3-CH1-Fc; VL3-VL4-VH4-VH3-CL-Fc; VH3-VH4-VL4-VL3-CL-Fc; VL3-VL4-VH4-VH3-CH1-CL-Fc; VH3-VH4-VL4-VL3-CH1-CL-Fc; VL3-VL4-VH4-VH3-CL-CH1-Fc; VH3-VH4-VL4-VL3-CL-CH1-Fc; VL3-L6-VL4-L7-VH4-L8-VH3-L9-CH1-Fe; VH3-L6-VH4-L7-VL4-L8-VL3-L9-CH1-Fc; VL3-L6-VL4-L7-VH4-L8-VH3-L9-CL-Fc; VH3-L6-VH4-L7-VL4-L8-VL3-L9-CL-Fc; VL3-L6-VL4-L7-VH4-L8-VH3-L9-CH1-L10-CL-Fc; VH3-L6-VH4-L7-VL4-L8-VL3-L9-CH1-L10-CL-Fc; VL3-L6-VL4-L7-VH4-L8-VH3-L9-CL-L10-CH1-Fc; or VH3-L6-VH4-L7-VL4-L8-VL3-L9-CL-L10-CH1-Fc. In some aspects, the first polypeptide has a structure represented by VH1-VH2-VL2-VL1-CL-CH1-Fc; and the second polypeptide has a structure represented by VL3-VL4-VH4-VH3-CH1-Fc; VH3-VH4-VL4-VL3-CH1-Fc; VL3-VL4-VH4-VH3-CL-Fc; VH3-VH4-VL4-VL3-CL-Fc; VL3-VL4-VH4-VH3-CH1-CL-Fc; VH3-VH4-VL4-VL3-CH1-CL-Fc; VL3-VL4-VH4-VH3-CL-CH1-Fc; VH3-VH4-VL4-VL3-CL-CH1-Fc; VL3-L6-VL4-L7-VH4-L8-VH3-L9-CH1-Fe; VH3-L6-VH4-L7-VL4-L8-VL3-L9-CH1-Fc; VL3-L6-VL4-L7-VH4-L8-VH3-L9-CL-Fc; VH3-L6-VH4-L7-VL4-L8-VL3-L9-CL-Fc; VL3-L6-VL4-L7-VH4-L8-VH3-L9-CH1-L10-CL-Fc; VH3-L6-VH4-L7-VL4-L8-VL3-L9-CH1-L10-CL-Fc; VL3-L6-VL4-L7-VH4-L8-VH3-L9-CL-L10-CH1-Fc; or VH3-L6-VH4-L7-VL4-L8-VL3-L9-CL-L10-CH1-Fc. In some aspects, the first polypeptide has a structure represented by VL1-L1-VL2-L2-VH2-L3-VH1-L4-CH1-Fc; and the second polypeptide has a structure represented by VL3-VL4-VH4-VH3-CH1-Fc; VH3-VH4-VL4-VL3-CH1-Fc; VL3-VL4-VH4-VH3-CL-Fc; VH3-VH4-VL4-VL3-CL-Fc; VL3-VL4-VH4-VH3-CH1-CL-Fc; VH3-VH4-VL4-VL3-CH1-CL-Fc; VL3-VL4-VH4-VH3-CL-CH1-Fc; VH3-VH4-VL4-VL3-CL-CH1-Fc; VL3-L6-VL4-L7-VH4-L8-VH3-L9-CH1-Fc; VH3-L6-VH4-L7-VL4-L8-VL3-L9-CH1-Fc; VL3-L6-VL4-L7-VH4-L8-VH3-L9-CL-Fc; VH3-L6-VH4-L7-VL4-L8-VL3-L9-CL-Fc; VL3-L6-VL4-L7-VH4-L8-VH3-L9-CH1-L10-CL-Fc; VH3-L6-VH4-L7-VL4-L8-VL3-L9-CH1-L10-CL-Fc; VL3-L6-VL4-L7-VH4-L8-VH3-L9-CL-L10-CH1-Fc; or VH3-L6-VH4-L7-VL4-L8-VL3-L9-CL-L10-CH1-Fc. In some aspects, the first polypeptide has a structure represented by VH1-L1-VH2-L2-VL2-L3-VL1-L4-CH1-Fc; and the second polypeptide has a structure represented by VL3-VL4-VH4-VH3-CH1-Fc; VH3-VH4-VL4-VL3-CH1-Fc; VL3-VL4-VH4-VH3-CL-Fc; VH3-VH4-VL4-VL3-CL-Fc; VL3-VL4-VH4-VH3-CH1-CL-Fc; VH3-VH4-VL4-VL3-CH1-CL-Fc; VL3-VL4-VH4-VH3-CL-CH1-Fc; VH3-VH4-VL4-VL3-CL-CH1-Fc; VL3-L6-VL4-L7-VH4-L8-VH3-L9-CH1-Fc; VH3-L6-VH4-L7-VL4-L8-VL3-L9-CH1-Fc; VL3-L6-VL4-L7-VH4-L8-VH3-L9-CL-Fc; VH3-L6-VH4-L7-VL4-L8-VL3-L9-CL-Fc; VL3-L6-VL4-L7-VH4-L8-VH3-L9-CH1-L10-CL-Fc; VH3-L6-VH4-L7-VL4-L8-VL3-L9-CH1-L10-CL-Fc; VL3-L6-VL4-L7-VH4-L8-VH3-L9-CL-L10-CH1-Fc; or VH3-L6-VH4-L7-VL4-L8-VL3-L9-CL-L10-CH1-Fc. In some aspects, the first polypeptide has a structure represented by VL1-L1-VL2-L2-VH2-L3-VH1-L4-CL-Fc; and the second polypeptide has a structure represented by VL3-VL4-VH4-VH3-CH1-Fc; VH3-VH4-VL4-VL3-CH1-Fc; VL3-VL4-VH4-VH3-CL-Fc; VH3-VH4-VL4-VL3-CL-Fc; VL3-VL4-VH4-VH3-CH1-CL-Fc; VH3-VH4-VL4-VL3-CH1-CL-Fc; VL3-VL4-VH4-VH3-CL-CH1-Fc; VH3-VH4-VL4-VL3-CL-CH1-Fc; VL3-L6-VL4-L7-VH4-L8-VH3-L9-CH1-Fc; VH3-L6-VH4-L7-VL4-L8-VL3-L9-CH1-Fc; VL3-L6-VL4-L7-VH4-L8-VH3-L9-CL-Fc; VH3-L6-VH4-L7-VL4-L8-VL3-L9-CL-Fc; VL3-L6-VL4-L7-VH4-L8-VH3-L9-CH1-L10-CL-Fc; VH3-L6-VH4-L7-VL4-L8-VL3-L9-CH1-L10-CL-Fc; VL3-L6-VL4-L7-VH4-L8-VH3-L9-CL-L10-CH1-Fc; or VH3-L6-VH4-L7-VL4-L8-VL3-L9-CL-L10-CH1-Fc. In some aspects, the first polypeptide has a structure represented by VH1-L1-VH2-L2-VL2-L3-VL1-L4-CL-Fc; and the second polypeptide has a structure represented by VL3-VL4-VH4-VH3-CH1-Fc; VH3-VH4-VL4-VL3-CH1-Fc; VL3-VL4-VH4-VH3-CL-Fc; VH3-VH4-VL4-VL3-CL-Fc; VL3-VL4-VH4-VH3-CH1-CL-Fc; VH3-VH4-VL4-VL3-CH1-CL-Fc; VL3-VL4-VH4-VH3-CL-CH1-Fc; VH3-VH4-VL4-VL3-CL-CH1-Fc; VL3-L6-VL4-L7-VH4-L8-VH3-L9-CH1-Fc; VH3-L6-VH4-L7-VL4-L8-VL3-L9-CH1-Fc; VL3-L6-VL4-L7-VH4-L8-VH3-L9-CL-Fc; VH3-L6-VH4-L7-VL4-L8-VL3-L9-CL-Fc; VL3-L6-VL4-L7-VH4-L8-VH3-L9-CH1-L10-CL-Fc; VH3-L6-VH4-L7-VL4-L8-VL3-L9-CH1-L10-CL-Fe; VL3-L6-VL4-L7-VH4-L8-VH3-L9-CL-L10-CH1-Fe; or VH3-L6-VH4-L7-VL4-L8-VL3-L9-CL-L10-CH1-Fe. In some aspects, the first polypeptide has a structure represented by VL1-L1-VL2-L2-VH2-L3-VH1-L4-CH1-L5-CL-Fc; and the second polypeptide has a structure represented by VL3-VL4-VH4-VH3-CH1-Fc; VH3-VH4-VL4-VL3-CH1-Fc; VL3-VL4-VH4-VH3-CL-Fc; VH3-VH4-VL4-VL3-CL-Fc; VL3-VL4-VH4-VH3-CH1-CL-Fc; VH3-VH4-VL4-VL3-CH1-CL-Fc; VL3-VL4-VH4-VH3-CL-CH1-Fc; VH3-VH4-VL4-VL3-CL-CH1-Fc; VL3-L6-VL4-L7-VH4-L8-VH3-L9-CH1-Fc; VH3-L6-VH4-L7-VL4-L8-VL3-L9-CH1-Fc; VL3-L6-VL4-L7-VH4-L8-VH3-L9-CL-Fc; VH3-L6-VH4-L7-VL4-L8-VL3-L9-CL-Fc; VL3-L6-VL4-L7-VH4-L8-VH3-L9-CH1-L10-CL-Fc; VH3-L6-VH4-L7-VL4-L8-VL3-L9-CH1-L10-CL-Fc; VL3-L6-VL4-L7-VH4-L8-VH3-L9-CL-L10-CH1-Fc; or VH3-L6-VH4-L7-VL4-L8-VL3-L9-CL-L10-CH1-Fe. In some aspects, the first polypeptide has a structure represented by VH1-L1-VH2-L2-VL2-L3-VL1-L4-CH1-L5-CL-Fe; and the second polypeptide has a structure represented by VL3-VL4-VH4-VH3-CH1-Fe; VH3-VH4-VL4-VL3-CH1-Fe; VL3-VL4-VH4-VH3-CL-Fc; VH3-VH4-VL4-VL3-CL-Fc; VL3-VL4-VH4-VH3-CH1-CL-Fc; VH3-VH4-VL4-VL3-CH1-CL-Fc; VL3-VL4-VH4-VH3-CL-CH1-Fc; VH3-VH4-VL4-VL3-CL-CH1-Fc; VL3-L6-VL4-L7-VH4-L8-VH3-L9-CH1-Fc; VH3-L6-VH4-L7-VL4-L8-VL3-L9-CH1-Fe; VL3-L6-VL4-L7-VH4- L8-VH3-L9-CL-Fc; VH3-L6-VH4-L7-VL4-L8-VL3-L9-CL-Fc; VL3-L6-VL4-L7-VH4-L8-VH3-L9-CH1-L10-CL-Fc; VH3-L6-VH4-L7-VL4-L8-VL3-L9-CH1-L10-CL-Fe; VL3-L6-VL4-L7-VH4-L8-VH3-L9-CL-L10-CH1-Fe; or VH3-L6-VH4-L7-VL4-L8-VL3-L9-CL-L10-CH1-Fe. In some aspects, the first polypeptide has a structure represented by VL1-L1-VL2-L2-VH2-L3-VH1-L4-CL-L5-CH1-Fe; and the second polypeptide has a structure represented by VL3-VL4-VH4-VH3-CH1-Fe; VH3-VH4-VL4-VL3-CH1-Fc; VL3-VL4-VH4-VH3-CL-Fc; VH3-VH4-VL4-VL3-CL-Fc; VL3-VL4-VH4-VH3-CH1-CL-Fc; VH3-VH4-VL4-VL3-CH1-CL-Fc; VL3-VL4-VH4-VH3-CL-CH1-Fc; VH3-VH4-VL4-VL3-CL-CH1-Fe; VL3-L6-VL4-L7-VH4-L8-VH3-L9-CH1-Fc; VH3-L6-VH4-L7-VL4-L8-VL3-L9-CH1-Fc; VL3-L6-VL4-L7-VH4-L8-VH3-L9-CL-Fc; VH3-L6-VH4-L7-VL4-L8-VL3-L9-CL-Fc; VL3-L6-VL4-L7-VH4-L8-VH3-L9-CH1-L10-CL-Fc; VH3-L6-VH4-L7-VL4-L8-VL3-L9-CH1-L10-CL-Fc; VL3-L6-VL4-L7-VH4-L8-VH3-L9-CL-L10-CH1-Fe; or VH3-L6-VH4-L7-VL4-L8-VL3-L9-CL-L10-CH1-Fe. In some aspects, the first polypeptide has a structure represented by VH1-L1-VH2-L2-VL2-L3-VL1-L4-CL-L5-CH1-Fe; and the second polypeptide has a structure represented by VL3-VL4-VH4-VH3-CH1-Fc; VH3-VH4-VL4-VL3-CH1-Fc; VL3-VL4-VH4-VH3-CL-Fc; VH3-VH4-VL4-VL3-CL-Fc; VL3-VL4-VH4-VH3-CH1-CL-Fe; VH3-VH4-VL4-VL3-CH1-CL-Fc; VL3-VL4-VH4-VH3-CL-CH1-Fc; VH3-VH4-VL4-VL3-CL-CH1-Fc; VL3-L6-VL4-L7-VH4-L8-VH3-L9-CH1-Fc; VH3-L6-VH4-L7-VL4-L8-VL3-L9-CH1-Fc; VL3-L6-VL4-L7-VH4-L8-VH3-L9-CL-Fc; VH3-L6-VH4-L7-VL4-L8-VL3-L9-CL-Fc; VL3-L6-VL4-L7-VH4-L8-VH3-L9-CH1-L10-CL-Fc; VH3-L6-VH4-L7-VL4-L8-VL3-L9-CH1-L10-CL-Fc; VL3-L6-VL4-L7-VH4-L8-VH3-L9-CL-L10-CH1-Fe; or VH3-L6-VH4-L7-VL4-L8-VL3-L9-CL-L10-CH1-Fe.

[0211] In other aspects, the invention is directed to an antigen binding polypeptide complex comprising a first polypeptide and a second polypeptide; wherein the first polypeptide has a structure represented by VL1-VL2-VH2-VH1; VH1-VH2-VL2-VL1; VL1-VL2-VH2-VH1-Fc; VH1-VH2-VL2-VL1-Fe; VL1-VL2-VH2-VH1-CH1; VH1-VH2-VL2-VL1-CH1; VL1-VL2-VH2-VH1-CL; VH1-VH2-VL2-VL1-CL; VL1-VL2-VH2-VH1-CH1-CL; VH1-VH2-VL2-VL1-CH1-CL; VL1-VL2-VH2-VH1-CL-CH1; VH1-VH2-VL2-VL1-CL-CH1; VL1-VL2-VH2-VH1-CH1-Fc; VH1-VH2-VL2-VL1-CH1-Fc; VL1-VL2-VH2-VH1-CL-Fc; VH1-VH2-VL2-VL1-CL-Fc; VL1-VL2-VH2-VH1-CH1-CL-Fc; VH1-VH2-VL2-VL1-CH1-CL-Fc; VL1-VL2-VH2-VH1-CL-CH1-Fc; VH1-VH2-VL2-VL1-CL-CH1-Fc; VL1-L1-VL2-L2-VH2-L3-VH1; VH1-L1-VH2-L2-VL2-L3-VL1; VL1-L1-VL2-L2-VH2-L3-VH1-Fc; VH1-L1-VH2-L2-VL2- L3-VL1-Fc; VL1-L1-VL2-L2-VH2-L3-VH1-L4-Fc; VH1-L1-VH2-L2-VL2-L3-VL1-L4-Fc; VL1-L1-VL2-L2-VH2-L3-VH1-L4-CH1; VH1-L1-VH2-L2-VL2-L3-VL1-L4-CH1; VL1-L1-VL2-L2-VH2-L3-VH1-L4-CL; VH1-L1-VH2- L2-VL2-L3-VL1-L4-CL; VL1-L1-VL2-L2-VH2-L3-VH1-L4-CH1-L5-CL; VH1-L1-VH2-L2-VL2-L3-VL1-L4-CH1- L5-CL; VL1-L1-VL2-L2-VH2-L3-VH1-L4-CL-L5-CH1; VH1-L1-VH2-L2-VL2-L3-VL1-L4-CL-L5-CH1; VL1-L1-VL2-L2-VH2-L3-VH1-L4-CH1-Fc; VH1-L1-VH2-L2-VL2-L3-VL1-L4-CH1-Fc; VL1-L1-VL2-L2-VH2-L3-VH1-L4- CL-Fc; VH1-L1-VH2-L2-VL2-L3-VL1-L4-CL-Fc; VL1-L1-VL2-L2-VH2-L3-VH1-L4-CH1-L5-CL-Fc; VH1-L1-VH2-L2-VL2-L3-VL1-L4-CH1-L5-CL-Fc; VL1-L1-VL2-L2-VH2-L3-VH1-L4-CL-L5-CH1-Fc; or VH1-L1-VH2-L2-VL2-L3-VL1-L4-CL-L5-CH1-Fc; wherein the second polypeptide has a structure represented by VL3-VL4-VH4-VH3; VH3-VH4-VL4-VL3; VL3-VL4-VH4-VH3-Fc; VH3-VH4-VL4-VL3-Fc; VL3-VL4-VH4-VH3-CH1; VH3-VH4-VL4-VL3-CH1; VL3-VL4-VH4-VH3-CL; VH3-VH4-VL4-VL3-CL; VL3-VL4-VH4-VH3-CH1-CL; VH3-VH4-VL4-VL3-CH1-CL; VL3-VL4-VH4-VH3-CL-CH1; VH3-VH4-VL4-VL3-CL-CH1; VL3-VL4-VH4-VH3-CH1-Fc; VH3-VH4-VL4-VL3-CH1-Fc; VL3-VL4-VH4-VH3-CL-Fc; VH3-VH4-VL4-VL3-CL-Fc; VL3-VL4-VH4-VH3-CH1-CL-Fc; VH3-VH4-VL4-VL3-CH1-CL-Fc; VL3-VL4-VH4-VH3-CL-CH1-Fc; VH3-VH4-VL4-VL3-CL-CH1-Fc; VL3-L6-VL4-L7-VH4-L8-VH3; VH3-L6-VH4-L7-VL4-L8-VL3; VL3-L6-VL4-L7-VH4-L8-VH3-Fc; VH3-L6-VH4-L7-VL4-L8- VL3-Fc; VL3-L6-VL4-L7-VH4-L8-VH3-L9-Fc; VH3-L6-VH4-L7-VL4-L8-VL3-L9-Fc; VL3-L6-VL4-L7-VH4-L8-VH3-L9-CH1; VH3-L6-VH4-L7-VL4-L8-VL3-L9-CH1; VL3-L6-VL4-L7-VH4-L8-VH3-L9-CL; VH3-L6-VH4-L7-VL4- L8-VL3-L9-CL; VL3-L6-VL4-L7-VH4-L8-VH3-L9-CH1-L10-CL; VH3-L6-VH4-L7-VL4-L8-VL3-L9-CH1-L10-CL; VL3-L6-VL4-L7-VH4-L8-VH3-L9-CL-L10-CH1; VH3-L6-VH4-L7-VL4-L8-VL3-L9-CL-L10-CH1; VL3-L6-VL4- L7-VH4-L8-VH3-L9-CH1-Fc; VH3-L6-VH4-L7-VL4-L8-VL3-L9-CH1-Fc; VL3-L6-VL4-L7-VH4-L8-VH3-L9-CL-Fc; VH3-L6-VH4-L7-VL4-L8-VL3-L9-CL-Fc; VL3-L6-VL4-L7-VH4-L8-VH3-L9-CH1-L10-CL-Fc; VH3-L6-VH4-L7-VL4-L8-VL3-L9-CH1-L10-CL-Fc; VL3-L6-VL4-L7-VH4-L8-VH3-L9-CL-L10-CH1-Fc; or VH3-L6-VH4-L7-VL4-L8-VL3-L9-CL-L10-CH1-Fc; wherein VL1 is a first immunoglobulin light chain variable region; VL2 is a second immunoglobulin light chain variable region; VL3 is a third immunoglobulin light chain variable region; VL4 is a fourth immunoglobulin light chain variable region; VH1 is a first immunoglobulin heavy chain variable region; VH2 is a second immunoglobulin heavy chain variable region; VH3 is a third immunoglobulin heavy chain variable region; VH4 is a fourth immunoglobulin heavy chain variable region; Fc is a region comprising an immunoglobulin heavy chain constant region 2 (CH2), an immunoglobulin heavy chain constant region 3 (CH3), and optionally, an immunoglobulin hinge; CH1 is an immunoglobulin heavy chain constant region 1; CL is an immunoglobulin light chain constant region; and L1, L2, L3, L4, L5, L6, L7, L8, L9 and L10 are amino acid linkers. In some aspects, the first polypeptide has a structure represented by VL1-VL2-VH2-VH1, and the second polypeptide has a structure represented by VL3-VL4-VH4-VH3; VH3-VH4-VL4-VL3; VL3-VL4-VH4-VH3-Fc; VH3-VH4-VL4-VL3-Fc; VL3-VL4-VH4-VH3-CH1; VH3-VH4-VL4-VL3-CH1; VL3-VL4-VH4-VH3-CL; VH3-VH4-VL4-VL3-CL; VL3-VL4-VH4-VH3-CH1-CL; VH3-VH4-VL4-VL3-CH1-CL; VL3-VL4-VH4-VH3-CL-CH1; VH3-VH4-VL4-VL3-CL-CH1; VL3-VL4-VH4-VH3-CH1-Fc; VH3-VH4-VL4-VL3-CH1-Fc; VL3-VL4-VH4-VH3-CL-Fc; VH3-VH4-VL4-VL3-CL-Fc; VL3-VL4-VH4-VH3-CH1-CL-Fc; VH3-VH4-VL4-VL3-CH1-CL-Fc; VL3-VL4-VH4-VH3-CL-CH1-Fc; VH3-VH4-VL4-VL3-CL-CH1-Fc; VL3-L6-VL4-L7-VH4-L8-VH3; VH3-L6-VH4-L7-VL4-L8-VL3; VL3-L6-VL4-L7-VH4-L8-VH3-Fc; VH3-L6-VH4- L7-VL4-L8-VL3-Fc; VL3-L6-VL4-L7-VH4-L8-VH3-L9-Fc; VH3-L6-VH4-L7-VL4-L8-VL3-L9-Fc; VL3-L6-VL4-L7-VH4-L8-VH3-L9-CH1; VH3-L6-VH4-L7-VL4-L8-VL3-L9-CH1; VL3-L6-VL4-L7-VH4-L8-VH3-L9-CL; VH3- L6-VH4-L7-VL4-L8-VL3-L9-CL; VL3-L6-VL4-L7-VH4-L8-VH3-L9-CH1-L10-CL; VH3-L6-VH4-L7-VL4-L8-VL3- L9-CH1-L10-CL; VL3-L6-VL4-L7-VH4-L8-VH3-L9-CL-L10-CH1; VH3-L6-VH4-L7-VL4-L8-VL3-L9-CL-L10-CH1; VL3-L6-VL4-L7-VH4-L8-VH3-L9-CH1-Fc; VH3-L6-VH4-L7-VL4-L8-VL3-L9-CH1-Fe; VL3-L6-VL4-L7-VH4- L8-VH3-L9-CL-Fc; VH3-L6-VH4-L7-VL4-L8-VL3-L9-CL-Fc; VL3-L6-VL4-L7-VH4-L8-VH3-L9-CH1-L10-CL-Fc; VH3-L6-VH4-L7-VL4-L8-VL3-L9-CH1-L10-CL-Fc; VL3-L6-VL4-L7-VH4-L8-VH3-L9-CL-L10-CH1-Fc; or VH3-L6-VH4-L7-VL4-L8-VL3-L9-CL-L10-CH1-Fc. In some aspects, the first polypeptide has a structure represented by VH1-VH2-VL2-VL1, and the second polypeptide has a structure represented by VL3-VL4-VH4-VH3; VH3-VH4-VL4-VL3; VL3-VL4-VH4-VH3-Fc; VH3-VH4-VL4-VL3-Fc; VL3-VL4-VH4-VH3-CH1; VH3-VH4-VL4-VL3-CH1; VL3-VL4-VH4-VH3-CL; VH3-VH4-VL4-VL3-CL; VL3-VL4-VH4-VH3-CH1-CL; VH3-VH4-VL4-VL3-CH1-CL; VL3-VL4-VH4-VH3-CL-CH1; VH3-VH4-VL4-VL3-CL-CH1; VL3-VL4-VH4-VH3-CH1-Fc; VH3-VH4-VL4-VL3-CH1-Fc; VL3-VL4-VH4-VH3-CL-Fc; VH3-VH4-VL4-VL3-CL-Fc; VL3-VL4-VH4-VH3-CH1-CL-Fc; VH3-VH4-VL4-VL3-CH1-CL-Fc; VL3-VL4-VH4-VH3-CL-CH1-Fc; VH3-VH4-VL4-VL3-CL-CH1-Fc; VL3-L6-VL4-L7-VH4-L8-VH3; VH3-L6-VH4-L7-VL4-L8-VL3; VL3-L6-VL4-L7-VH4-L8-VH3-Fc; VH3-L6-VH4-L7-VL4-L8-VL3-Fc; VL3-L6-VL4-L7-VH4-L8-VH3-L9-Fc; VH3-L6-VH4-L7-VL4-L8-VL3-L9-Fc; VL3-L6-VL4-L7-VH4-L8-VH3-L9- CH1; VH3-L6-VH4-L7-VL4-L8-VL3-L9-CH1; VL3-L6-VL4-L7-VH4-L8-VH3-L9-CL; VH3-L6-VH4-L7-VL4-L8-VL3-L9-CL; VL3-L6-VL4-L7-VH4-L8-VH3-L9-CH1-L10-CL; VH3-L6-VH4-L7-VL4-L8-VL3-L9-CH1-L10-CL; VL3-L6-VL4-L7-VH4-L8-VH3-L9-CL-L10-CH1; VH3-L6-VH4-L7-VL4-L8-VL3-L9-CL-L10-CH1; VL3-L6-VL4-L7-VH4-L8-VH3-L9-CH1-Fc; VH3-L6-VH4-L7-VL4-L8-VL3-L9-CH1-Fc; VL3-L6-VL4-L7-VH4-L8-VH3-L9-CL-Fc; VH3-L6-VH4-L7-VL4-L8-VL3-L9-CL-Fc; VL3-L6-VL4-L7-VH4-L8-VH3-L9-CH1-L10-CL-Fc; VH3-L6-VH4-L7-VL4-L8-VL3-L9-CH1-L10-CL-Fc; VL3-L6-VL4-L7-VH4-L8-VH3-L9-CL-L10-CH1-Fc; or VH3-L6-VH4-L7-VL4-L8-VL3-L9-CL-L10-CH1-Fc. In some aspects, the first polypeptide has a structure represented by VL1-VL2-VH2-VH1-Fc, and the second polypeptide has a structure represented by VL3-VL4-VH4-VH3; VH3-VH4-VL4-VL3; VL3-VL4-VH4-VH3-Fc; VH3-VH4-VL4-VL3-Fc; VL3-VL4-VH4-VH3-CH1; VH3-VH4-VL4-VL3-CH1; VL3-VL4-VH4-VH3-CL; VH3-VH4-VL4-VL3-CL; VL3-VL4-VH4-VH3-CH1-CL; VH3-VH4-VL4-VL3-CH1-CL; VL3-VL4-VH4-VH3-CL-CH1; VH3-VH4-VL4-VL3-CL-CH1; VL3-VL4-VH4-VH3-CH1-Fe; VH3-VH4-VL4-VL3-CH1-Fc; VL3-VL4-VH4-VH3-CL-Fc; VH3-VH4-VL4-VL3-CL-Fc; VL3-VL4-VH4-VH3-CH1-CL-Fc; VH3-VH4-VL4-VL3-CH1-CL-Fc; VL3-VL4-VH4-VH3-CL-CH1-Fc; VH3-VH4-VL4-VL3-CL-CH1-Fc; VL3-L6-VL4-L7-VH4-L8-VH3; VH3-L6-VH4-L7-VL4-L8-VL3; VL3-L6-VL4-L7-VH4-L8-VH3-Fc; VH3-L6-VH4-L7-VL4-L8-VL3-Fc; VL3-L6-VL4-L7-VH4-L8-VH3-L9-Fc; VH3-L6-VH4-L7-VL4-L8-VL3-L9-Fc; VL3-L6-VL4-L7-VH4-L8-VH3-L9-CH1; VH3-L6-VH4-L7- VL4-L8-VL3-L9-CH1; VL3-L6-VL4-L7-VH4-L8-VH3-L9-CL; VH3-L6-VH4-L7-VL4-L8-VL3-L9-CL; VL3-L6-VL4- L7-VH4-L8-VH3-L9-CH1-L10-CL; VH3-L6-VH4-L7-VL4-L8-VL3-L9-CH1-L10-CL; VL3-L6-VL4-L7-VH4-L8-VH3-L9-CL-L10-CH1; VH3-L6-VH4-L7-VL4-L8-VL3-L9-CL-L10-CH1; VL3-L6-VL4-L7-VH4-L8-VH3-L9-CH1-Fc; VH3-L6-VH4-L7-VL4-L8-VL3-L9-CH1-Fc; VL3-L6-VL4-L7-VH4-L8-VH3-L9-CL-Fc; VH3-L6-VH4-L7-VL4-L8-VL3-L9-CL-Fc; VL3-L6-VL4-L7-VH4-L8-VH3-L9-CH1-L10-CL-Fc; VH3-L6-VH4-L7-VL4-L8-VL3-L9-CH1-L10-CL-Fc; VL3-L6-VL4-L7-VH4-L8-VH3-L9-CL-L10-CH1-Fc; or VH3-L6-VH4-L7-VL4-L8-VL3-L9-CL-L10-CH1-Fc. In some aspects, the first polypeptide has a structure represented by VH1-VH2-VL2-VL1-Fc, and the second polypeptide has a structure represented by VL3-VL4-VH4-VH3; VH3-VH4-VL4-VL3; VL3-VL4-VH4-VH3-Fc; VH3-VH4-VL4-VL3-Fc; VL3-VL4-VH4-VH3-CH1; VH3-VH4-VL4-VL3-CH1; VL3-VL4-VH4-VH3-CL; VH3-VH4-VL4-VL3-CL; VL3-VL4-VH4-VH3-CH1-CL; VH3-VH4-VL4-VL3-CH1-CL; VL3-VL4-VH4-VH3-CL-CH1; VH3-VH4-VL4-VL3-CL-CH1; VL3-VL4-VH4-VH3-CH1-Fc; VH3-VH4-VL4-VL3-CH1-Fc; VL3-VL4-VH4-VH3-CL-Fc; VH3-VH4-VL4-VL3-CL-Fc; VL3-VL4-VH4-VH3-CH1-CL-Fc; VH3-VH4-VL4-VL3-CH1-CL-Fc; VL3-VL4-VH4-VH3-CL-CH1-Fc; VH3-VH4-VL4-VL3-CL-CH1-Fc; VL3-L6-VL4-L7-VH4-L8-VH3; VH3-L6-VH4-L7-VL4-L8-VL3; VL3-L6-VL4-L7-VH4-L8-VH3-Fc; VH3-L6-VH4-L7-VL4-L8-VL3-Fc; VL3-L6-VL4-L7-VH4-L8-VH3-L9-Fc; VH3-L6-VH4-L7-VL4-L8-VL3-L9-Fc; VL3-L6-VL4-L7-VH4-L8-VH3-L9-CH1; VH3-L6-VH4-L7-VL4-L8-VL3-L9-CH1; VL3-L6- VL4-L7-VH4-L8-VH3-L9-CL; VH3-L6-VH4-L7-VL4-L8-VL3-L9-CL; VL3-L6-VL4-L7-VH4-L8-VH3-L9-CH1-L10-CL; VH3-L6-VH4-L7-VL4-L8-VL3-L9-CH1-L10-CL; VL3-L6-VL4-L7-VH4-L8-VH3-L9-CL-L10-CH1; VH3-L6-VH4-L7-VL4-L8-VL3-L9-CL-L10-CH1; VL3-L6-VL4-L7-VH4-L8-VH3-L9-CH1-Fc; VH3-L6-VH4-L7-VL4-L8-VL3- L9-CH1-Fc; VL3-L6-VL4-L7-VH4-L8-VH3-L9-CL-Fc; VH3-L6-VH4-L7-VL4-L8-VL3-L9-CL-Fc; VL3-L6-VL4-L7-VH4-L8-VH3-L9-CH1-L10-CL-Fc; VH3-L6-VH4-L7-VL4-L8-VL3-L9-CH1-L10-CL-Fc; VL3-L6-VL4-L7-VH4-L8-VH3-L9-CL-L10-CH1-Fc; or VH3-L6-VH4-L7-VL4-L8-VL3-L9-CL-L10-CH1-Fc. In some aspects, the first polypeptide has a structure represented by VL1-VL2-VH2-VH1-CH1, and the second polypeptide has a structure represented by VL3-VL4-VH4-VH3; VH3-VH4-VL4-VL3; VL3-VL4-VH4-VH3-Fc; VH3-VH4-VL4-VL3-Fc; VL3-VL4-VH4-VH3-CH1; VH3-VH4-VL4-VL3-CH1; VL3-VL4-VH4-VH3-CL; VH3-VH4-VL4-VL3-CL; VL3-VL4-VH4-VH3-CH1-CL; VH3-VH4-VL4-VL3-CH1-CL; VL3-VL4-VH4-VH3-CL-CH1; VH3-VH4-VL4-VL3-CL-CH1; VL3-VL4-VH4-VH3-CH1-Fc; VH3-VH4-VL4-VL3-CH1-Fc; VL3-VL4-VH4-VH3-CL-Fc; VH3-VH4-VL4-VL3-CL-Fc; VL3-VL4-VH4-VH3-CH1-CL-Fc; VH3-VH4-VL4-VL3-CH1-CL-Fc; VL3-VL4-VH4-VH3-CL-CH1-Fc; VH3-VH4-VL4-VL3-CL-CH1-Fc; VL3-L6-VL4-L7-VH4-L8-VH3; VH3-L6-VH4-L7-VL4-L8-VL3; VL3-L6-VL4-L7-VH4-L8-VH3-Fc; VH3-L6-VH4-L7-VL4-L8-VL3-Fc; VL3-L6-VL4-L7-VH4-L8-VH3-L9-Fc; VH3-L6-VH4-L7-VL4-L8-VL3-L9-Fc; VL3-L6-VL4-L7-VH4-L8-VH3-L9-CH1; VH3-L6-VH4-L7-VL4-L8-VL3-L9-CH1; VL3-L6-VL4-L7- VH4-L8-VH3-L9-CL; VH3-L6-VH4-L7-VL4-L8-VL3-L9-CL; VL3-L6-VL4-L7-VH4-L8-VH3-L9-CH1-L10-CL; VH3-L6-VH4-L7-VL4-L8-VL3-L9-CH1-L10-CL; VL3-L6-VL4-L7-VH4-L8-VH3-L9-CL-L10-CH1; VH3-L6-VH4-L7-VL4-L8-VL3-L9-CL-L10-CH1; VL3-L6-VL4-L7-VH4-L8-VH3-L9-CH1-Fc; VH3-L6-VH4-L7-VL4-L8-VL3-L9-CH1-Fc; VL3-L6-VL4-L7-VH4-L8-VH3-L9-CL-Fc; VH3-L6-VH4-L7-VL4-L8-VL3-L9-CL-Fc; VL3-L6-VL4-L7-VH4-L8-VH3-L9-CH1-L10-CL-Fc; VH3-L6-VH4-L7-VL4-L8-VL3-L9-CH1-L10-CL-Fc; VL3-L6-VL4-L7-VH4-L8-VH3-L9-CL-L10-CH1-Fc; or VH3-L6-VH4-L7-VL4-L8-VL3-L9-CL-L10-CH1-Fc. In some aspects, the first polypeptide has a structure represented by VH1-VH2-VL2-VL1-CH1, and the second polypeptide has a structure represented by VL3-VL4-VH4-VH3; VH3-VH4-VL4-VL3; VL3-VL4-VH4-VH3-Fc; VH3-VH4-VL4-VL3-Fc; VL3-VL4-VH4-VH3-CH1; VH3-VH4-VL4-VL3-CH1; VL3-VL4-VH4-VH3-CL; VH3-VH4-VL4-VL3-CL; VL3-VL4-VH4-VH3-CH1-CL; VH3-VH4-VL4-VL3-CH1-CL; VL3-VL4-VH4-VH3-CL-CH1; VH3-VH4-VL4-VL3-CL-CH1; VL3-VL4-VH4-VH3-CH1-Fc; VH3-VH4-VL4-VL3-CH1-Fc; VL3-VL4-VH4-VH3-CL-Fc; VH3-VH4-VL4-VL3-CL-Fc; VL3-VL4-VH4-VH3-CH1-CL-Fc; VH3-VH4-VL4-VL3-CH1-CL-Fc; VL3-VL4-VH4-VH3-CL-CH1-Fc; VH3-VH4-VL4-VL3-CL-CH1-Fc; VL3-L6-VL4-L7-VH4-L8-VH3; VH3-L6-VH4-L7-VL4-L8-VL3; VL3-L6-VL4-L7-VH4-L8-VH3-Fc; VH3-L6-VH4-L7-VL4- L8-VL3-Fe; VL3-L6-VL4-L7-VH4-L8-VH3-L9-Fc; VH3-L6-VH4-L7-VL4-L8-VL3-L9-Fc; VL3-L6-VL4-L7-VH4-L8-VH3-L9-CH1; VH3-L6-VH4-L7-VL4-L8-VL3-L9-CH1; VL3-L6-VL4-L7-VH4-L8-VH3-L9-CL; VH3-L6-VH4- L7-VL4-L8-VL3-L9-CL; VL3-L6-VL4-L7-VH4-L8-VH3-L9-CH1-L10-CL; VH3-L6-VH4-L7-VL4-L8-VL3-L9-CH1- L10-CL; VL3-L6-VL4-L7-VH4-L8-VH3-L9-CL-L10-CH1; VH3-L6-VH4-L7-VL4-L8-VL3-L9-CL-L10-CH1; VL3-L6-VL4-L7-VH4-L8-VH3-L9-CH1-Fc; VH3-L6-VH4-L7-VL4-L8-VL3-L9-CH1-Fc; VL3-L6-VL4-L7-VH4-L8-VH3- L9-CL-Fc; VH3-L6-VH4-L7-VL4-L8-VL3-L9-CL-Fc; VL3-L6-VL4-L7-VH4-L8-VH3-L9-CH1-L10-CL-Fc; VH3-L6-VH4-L7-VL4-L8-VL3-L9-CH1-L10-CL-Fc; VL3-L6-VL4-L7-VH4-L8-VH3-L9-CL-L10-CH1-Fc; or VH3-L6-VH4-L7-VL4-L8-VL3-L9-CL-L10-CH1-Fc. In some aspects, the first polypeptide has a structure represented by VL1-VL2-VH2-VH1-CL, and the second polypeptide has a structure represented by VL3-VL4-VH4-VH3; VH3-VH4-VL4-VL3; VL3-VL4-VH4-VH3-Fc; VH3-VH4-VL4-VL3-Fc; VL3-VL4-VH4-VH3-CH1; VH3-VH4-VL4-VL3-CH1; VL3-VL4-VH4-VH3-CL; VH3-VH4-VL4-VL3-CL; VL3-VL4-VH4-VH3-CH1-CL; VH3-VH4-VL4-VL3-CH1-CL; VL3-VL4-VH4-VH3-CL-CH1; VH3-VH4-VL4-VL3-CL-CH1; VL3-VL4-VH4-VH3-CH1-Fc; VH3-VH4-VL4-VL3-CH1-Fc; VL3-VL4-VH4-VH3-CL-Fc; VH3-VH4-VL4-VL3-CL-Fc; VL3-VL4-VH4-VH3-CH1-CL-Fc; VH3-VH4-VL4-VL3-CH1-CL-Fc; VL3-VL4-VH4-VH3-CL-CH1-Fc; VH3-VH4-VL4-VL3-CL-CH1-Fc; VL3-L6-VL4-L7-VH4-L8-VH3; VH3-L6-VH4-L7-VL4-L8-VL3; VL3-L6-VL4-L7-VH4-L8-VH3-Fc; VH3-L6-VH4-L7-VL4-L8-VL3-Fc; VL3-L6-VL4-L7-VH4-L8-VH3-L9-Fe; VH3-L6-VH4-L7-VL4-L8-VL3-L9-Fc; VL3-L6-VL4-L7-VH4-L8-VH3-L9-CH1; VH3-L6-VH4-L7-VL4-L8-VL3-L9-CH1; VL3-L6-VL4-L7-VH4-L8-VH3-L9-CL; VH3-L6-VH4-L7-VL4-L8-VL3-L9-CL; VL3-L6-VL4-L7-VH4-L8-VH3-L9-CH1-L10-CL; VH3-L6-VH4-L7-VL4-L8-VL3-L9-CH1-L10-CL; VL3-L6-VL4- L7-VH4-L8-VH3-L9-CL-L10-CH1; VH3-L6-VH4-L7-VL4-L8-VL3-L9-CL-L10-CH1; VL3-L6-VL4-L7-VH4-L8-VH3-L9-CH1-Fc; VH3-L6-VH4-L7-VL4-L8-VL3-L9-CH1-Fe; VL3-L6-VL4-L7-VH4-L8-VH3-L9-CL-Fc; VH3-L6-VH4-L7-VL4-L8-VL3-L9-CL-Fc; VL3-L6-VL4-L7-VH4-L8-VH3-L9-CH1-L10-CL-Fc; VH3-L6-VH4-L7-VL4-L8-VL3-L9-CH1-L10-CL-Fc; VL3-L6-VL4-L7-VH4-L8-VH3-L9-CL-L10-CH1-Fc; or VH3-L6-VH4-L7-VL4-L8-VL3-L9-CL-L10-CH1-Fc. In some aspects, the first polypeptide has a structure represented by VH1-VH2-VL2-VL1-CL, and the second polypeptide has a structure represented by VL3-VL4-VH4-VH3; VH3-VH4-VL4-VL3; VL3-VL4-VH4-VH3-Fc; VH3-VH4-VL4-VL3-Fc; VL3-VL4-VH4-VH3-CH1; VH3-VH4-VL4-VL3-CH1; VL3-VL4-VH4-VH3-CL; VH3-VH4-VL4-VL3-CL; VL3-VL4-VH4-VH3-CH1-CL; VH3-VH4-VL4-VL3-CH1-CL; VL3-VL4-VH4-VH3-CL-CH1; VH3-VH4-VL4-VL3-CL-CH1; VL3-VL4-VH4-VH3-CH1-Fc; VH3-VH4-VL4-VL3-CH1-Fc; VL3-VL4-VH4-VH3-CL-Fc; VH3-VH4-VL4-VL3-CL-Fc; VL3-VL4-VH4-VH3-CH1-CL-Fc; VH3-VH4-VL4-VL3-CH1-CL-Fc; VL3-VL4-VH4-VH3-CL-CH1-Fc; VH3-VH4-VL4-VL3-CL-CH1-Fc; VL3-L6-VL4-L7-VH4-L8-VH3; VH3-L6-VH4-L7-VL4-L8-VL3; VL3-L6-VL4-L7-VH4-L8-VH3-Fc; VH3-L6-VH4-L7-VL4-L8-VL3-Fc; VL3-L6-VL4-L7-VH4-L8-VH3-L9-Fc; VH3-L6-VH4-L7-VL4-L8-VL3-L9-Fc; VL3-L6-VL4-L7-VH4-L8-VH3-L9-CH1; VH3-L6-VH4-L7-VL4-L8-VL3-L9-CH1; VL3-L6-VL4-L7-VH4-L8-VH3-L9-CL; VH3-L6-VH4-L7-VL4-L8-VL3-L9-CL; VL3-L6-VL4-L7-VH4-L8-VH3- L9-CH1-L10-CL; VH3-L6-VH4-L7-VL4-L8-VL3-L9-CH1-L10-CL; VL3-L6-VL4-L7-VH4-L8-VH3-L9-CL-L10-CH1; VH3-L6-VH4-L7-VL4-L8-VL3-L9-CL-L10-CH1; VL3-L6-VL4-L7-VH4-L8-VH3-L9-CH1-Fc; VH3-L6-VH4-L7-VL4-L8-VL3-L9-CH1-Fc; VL3-L6-VL4-L7-VH4-L8-VH3-L9-CL-Fc; VH3-L6-VH4-L7-VL4-L8-VL3-L9-CL-Fc; VL3-L6-VL4-L7-VH4-L8-VH3-L9-CH1-L10-CL-Fc; VH3-L6-VH4-L7-VL4-L8-VL3-L9-CH1-L10-CL-Fc; VL3-L6-VL4-L7-VH4-L8-VH3-L9-CL-L10-CH1-Fc; or VH3-L6-VH4-L7-VL4-L8-VL3-L9-CL-L10-CH1-Fc. In some aspects, the first polypeptide has a structure represented by VL1-VL2-VH2-VH1-CH1-CL, and the second polypeptide has a structure represented by VL3-VL4-VH4-VH3; VH3-VH4-VL4-VL3; VL3-VL4-VH4-VH3-Fc; VH3-VH4-VL4-VL3-Fc; VL3-VL4-VH4-VH3-CH1; VH3-VH4-VL4-VL3-CH1; VL3-VL4-VH4-VH3-CL; VH3-VH4-VL4-VL3-CL; VL3-VL4-VH4-VH3-CH1-CL; VH3-VH4-VL4-VL3-CH1-CL; VL3-VL4-VH4-VH3-CL-CH1; VH3-VH4-VL4-VL3-CL-CH1; VL3-VL4-VH4-VH3-CH1-Fc; VH3-VH4-VL4-VL3-CH1-Fc; VL3-VL4-VH4-VH3-CL-Fc; VH3-VH4-VL4-VL3-CL-Fc; VL3-VL4-VH4-VH3-CH1-CL-Fc; VH3-VH4-VL4-VL3-CH1-CL-Fc; VL3-VL4-VH4-VH3-CL-CH1-Fc; VH3-VH4-VL4-VL3-CL-CH1-Fc; VL3-L6-VL4-L7-VH4-L8-VH3; VH3-L6-VH4-L7-VL4-L8-VL3; VL3-L6-VL4-L7-VH4-L8-VH3-Fc; VH3-L6-VH4-L7-VL4-L8-VL3-Fc; VL3-L6-VL4-L7-VH4-L8-VH3-L9-Fc; VH3-L6-VH4-L7-VL4-L8-VL3-L9-Fc; VL3-L6-VL4-L7-VH4-L8-VH3-L9-CH1; VH3-L6-VH4-L7-VL4-L8-VL3-L9-CH1; VL3-L6-VL4- L7-VH4-L8-VH3-L9-CL; VH3-L6-VH4-L7-VL4-L8-VL3-L9-CL; VL3-L6-VL4-L7-VH4-L8-VH3-L9-CH1-L10-CL; VH3-L6-VH4-L7-VL4-L8-VL3-L9-CH1-L10-CL; VL3-L6-VL4-L7-VH4-L8-VH3-L9-CL-L10-CH1; VH3-L6-VH4-L7-VL4-L8-VL3-L9-CL-L10-CH1; VL3-L6-VL4-L7-VH4-L8-VH3-L9-CH1-Fc; VH3-L6-VH4-L7-VL4-L8-VL3- L9-CH1-Fc; VL3-L6-VL4-L7-VH4-L8-VH3-L9-CL-Fc; VH3-L6-VH4-L7-VL4-L8-VL3-L9-CL-Fc; VL3-L6-VL4-L7-VH4-L8-VH3-L9-CH1-L10-CL-Fc; VH3-L6-VH4-L7-VL4-L8-VL3-L9-CH1-L10-CL-Fc; VL3-L6-VL4-L7-VH4-L8-VH3-L9-CL-L10-CH1-Fc; or VH3-L6-VH4-L7-VL4-L8-VL3-L9-CL-L10-CH1-Fc. In some aspects, the first polypeptide has a structure represented by VH1-VH2-VL2-VL1-CH1-CL, and the second polypeptide has a structure represented by VL3-VL4-VH4-VH3; VH3-VH4-VL4-VL3; VL3-VL4-VH4-VH3-Fc; VH3-VH4-VL4-VL3-Fc; VL3-VL4-VH4-VH3-CH1; VH3-VH4-VL4-VL3-CH1; VL3-VL4-VH4-VH3-CL; VH3-VH4-VL4-VL3-CL; VL3-VL4-VH4-VH3-CH1-CL; VH3-VH4-VL4-VL3-CH1-CL; VL3-VL4-VH4-VH3-CL-CH1; VH3-VH4-VL4-VL3-CL-CH1; VL3-VL4-VH4-VH3-CH1-Fc; VH3-VH4-VL4-VL3-CH1-Fc; VL3-VL4-VH4-VH3-CL-Fc; VH3-VH4-VL4-VL3-CL-Fc; VL3-VL4-VH4-VH3-CH1-CL-Fc; VH3-VH4-VL4-VL3-CH1-CL-Fc; VL3-VL4-VH4-VH3-CL-CH1-Fc; VH3-VH4-VL4-VL3-CL-CH1-Fc; VL3-L6-VL4-L7-VH4-L8-VH3; VH3-L6-VH4-L7-VL4-L8-VL3; VL3-L6-VL4-L7-VH4-L8-VH3-Fc; VH3-L6-VH4-L7-VL4-L8-VL3-Fc; VL3-L6-VL4-L7-VH4-L8-VH3-L9-Fc; VH3-L6-VH4-L7-VL4-L8-VL3-L9-Fc; VL3-L6-VL4-L7-VH4-L8-VH3-L9-CH1; VH3-L6-VH4-L7-VL4-L8-VL3-L9-CH1; VL3-L6-VL4-L7- VH4-L8-VH3-L9-CL; VH3-L6-VH4-L7-VL4-L8-VL3-L9-CL; VL3-L6-VL4-L7-VH4-L8-VH3-L9-CH1-L10-CL; VH3-L6-VH4-L7-VL4-L8-VL3-L9-CH1-L10-CL; VL3-L6-VL4-L7-VH4-L8-VH3-L9-CL-L10-CH1; VH3-L6-VH4-L7-VL4-L8-VL3-L9-CL-L10-CH1; VL3-L6-VL4-L7-VH4-L8-VH3-L9-CH1-Fc; VH3-L6-VH4-L7-VL4-L8-VL3-L9-CH1-Fc; VL3-L6-VL4-L7-VH4-L8-VH3-L9-CL-Fc; VH3-L6-VH4-L7-VL4-L8-VL3-L9-CL-Fc; VL3-L6-VL4-L7-VH4-L8-VH3-L9-CH1-L10-CL-Fc; VH3-L6-VH4-L7-VL4-L8-VL3-L9-CH1-L10-CL-Fc; VL3-L6-VL4-L7-VH4-L8-VH3-L9-CL-L10-CH1-Fc; or VH3-L6-VH4-L7-VL4-L8-VL3-L9-CL-L10-CH1-Fc. In some aspects, the first polypeptide has a structure represented by VL1-VL2-VH2-VH1-CL-CH1, and the second polypeptide has a structure represented by VL3-VL4-VH4-VH3; VH3-VH4-VL4-VL3; VL3-VL4-VH4-VH3-Fc; VH3-VH4-VL4-VL3-Fc; VL3-VL4-VH4-VH3-CH1; VH3-VH4-VL4-VL3-CH1; VL3-VL4-VH4-VH3-CL; VH3-VH4-VL4-VL3-CL; VL3-VL4-VH4-VH3-CH1-CL; VH3-VH4-VL4-VL3-CH1-CL; VL3-VL4-VH4-VH3-CL-CH1; VH3-VH4-VL4-VL3-CL-CH1; VL3-VL4-VH4-VH3-CH1-Fc; VH3-VH4-VL4-VL3-CH1-Fc; VL3-VL4-VH4-VH3-CL-Fc; VH3-VH4-VL4-VL3-CL-Fc; VL3-VL4-VH4-VH3-CH1-CL-Fc; VH3-VH4-VL4-VL3-CH1-CL-Fc; VL3-VL4-VH4-VH3-CL-CH1-Fc; VH3-VH4-VL4-VL3-CL-CH1-Fc; VL3-L6-VL4-L7-VH4-L8-VH3; VH3-L6-VH4-L7-VL4-L8-VL3; VL3-L6-VL4-L7-VH4-L8-VH3-Fc; VH3-L6-VH4- L7-VL4-L8-VL3-Fc; VL3-L6-VL4-L7-VH4-L8-VH3-L9-Fc; VH3-L6-VH4-L7-VL4-L8-VL3-L9-Fc; VL3-L6-VL4-L7-VH4-L8-VH3-L9-CH1; VH3-L6-VH4-L7-VL4-L8-VL3-L9-CH1; VL3-L6-VL4-L7-VH4-L8-VH3-L9-CL; VH3- L6-VH4-L7-VL4-L8-VL3-L9-CL; VL3-L6-VL4-L7-VH4-L8-VH3-L9-CH1-L10-CL; VH3-L6-VH4-L7-VL4-L8-VL3- L9-CH1-L10-CL; VL3-L6-VL4-L7-VH4-L8-VH3-L9-CL-L10-CH1; VH3-L6-VH4-L7-VL4-L8-VL3-L9-CL-L10-CH1; VL3-L6-VL4-L7-VH4-L8-VH3-L9-CH1-Fc; VH3-L6-VH4-L7-VL4-L8-VL3-L9-CH1-Fe; VL3-L6-VL4-L7-VH4- L8-VH3-L9-CL-Fc; VH3-L6-VH4-L7-VL4-L8-VL3-L9-CL-Fc; VL3-L6-VL4-L7-VH4-L8-VH3-L9-CH1-L10-CL-Fc; VH3-L6-VH4-L7-VL4-L8-VL3-L9-CH1-L10-CL-Fc; VL3-L6-VL4-L7-VH4-L8-VH3-L9-CL-L10-CH1-Fc; or VH3-L6-VH4-L7-VL4-L8-VL3-L9-CL-L10-CH1-Fc. In some aspects, the first polypeptide has a structure represented by VH1-VH2-VL2-VL1-CL-CH1, and the second polypeptide has a structure represented by VL3-VL4-VH4-VH3; VH3-VH4-VL4-VL3; VL3-VL4-VH4-VH3-Fc; VH3-VH4-VL4-VL3-Fc; VL3-VL4-VH4-VH3-CH1; VH3-VH4-VL4-VL3-CH1; VL3-VL4-VH4-VH3-CL; VH3-VH4-VL4-VL3-CL; VL3-VL4-VH4-VH3-CH1-CL; VH3-VH4-VL4-VL3-CH1-CL; VL3-VL4-VH4-VH3-CL-CH1; VH3-VH4-VL4-VL3-CL-CH1; VL3-VL4-VH4-VH3-CH1-Fc; VH3-VH4-VL4-VL3-CH1-Fc; VL3-VL4-VH4-VH3-CL-Fc; VH3-VH4-VL4-VL3-CL-Fc; VL3-VL4-VH4-VH3-CH1-CL-Fc; VH3-VH4-VL4-VL3-CH1-CL-Fc; VL3-VL4-VH4-VH3-CL-CH1-Fc; VH3-VH4-VL4-VL3-CL-CH1-Fc; VL3-L6-VL4-L7-VH4-L8-VH3; VH3-L6-VH4-L7-VL4-L8-VL3; VL3-L6-VL4-L7-VH4-L8-VH3-Fc; VH3-L6-VH4-L7-VL4-L8- VL3-Fc; VL3-L6-VL4-L7-VH4-L8-VH3-L9-Fc; VH3-L6-VH4-L7-VL4-L8-VL3-L9-Fc; VL3-L6-VL4-L7-VH4-L8-VH3-L9-CH1; VH3-L6-VH4-L7-VL4-L8-VL3-L9-CH1; VL3-L6-VL4-L7-VH4-L8-VH3-L9-CL; VH3-L6-VH4-L7-VL4- L8-VL3-L9-CL; VL3-L6-VL4-L7-VH4-L8-VH3-L9-CH1-L10-CL; VH3-L6-VH4-L7-VL4-L8-VL3-L9-CH1-L10-CL; VL3-L6-VL4-L7-VH4-L8-VH3-L9-CL-L10-CH1; VH3-L6-VH4-L7-VL4-L8-VL3-L9-CL-L10-CH1; VL3-L6-VL4- L7-VH4-L8-VH3-L9-CH1-Fc; VH3-L6-VH4-L7-VL4-L8-VL3-L9-CH1-Fc; VL3-L6-VL4-L7-VH4-L8-VH3-L9-CL-Fc; VH3-L6-VH4-L7-VL4-L8-VL3-L9-CL-Fc; VL3-L6-VL4-L7-VH4-L8-VH3-L9-CH1-L10-CL-Fc; VH3-L6-VH4-L7-VL4-L8-VL3-L9-CH1-L10-CL-Fc; VL3-L6-VL4-L7-VH4-L8-VH3-L9-CL-L10-CH1-Fc; or VH3-L6-VH4-L7-VL4-L8-VL3-L9-CL-L10-CH1-Fc. In some aspects, the first polypeptide has a structure represented by VL1-VL2-VH2-VH1-CH1-Fc, and the second polypeptide has a structure represented by VL3-VL4-VH4-VH3; VH3-VH4-VL4-VL3; VL3-VL4-VH4-VH3-Fc; VH3-VH4-VL4-VL3-Fc; VL3-VL4-VH4-VH3-CH1; VH3-VH4-VL4-VL3-CH1; VL3-VL4-VH4-VH3-CL; VH3-VH4-VL4-VL3-CL; VL3-VL4-VH4-VH3-CH1-CL; VH3-VH4-VL4-VL3-CH1-CL; VL3-VL4-VH4-VH3-CL-CH1; VH3-VH4-VL4-VL3-CL-CH1; VL3-VL4-VH4-VH3-CH1-Fc; VH3-VH4-VL4-VL3-CH1-Fc; VL3-VL4-VH4-VH3-CL-Fc; VH3-VH4-VL4-VL3-CL-Fc; VL3-VL4-VH4-VH3-CH1-CL-Fc; VH3-VH4-VL4-VL3-CH1-CL-Fc; VL3-VL4-VH4-VH3-CL-CH1-Fc; VH3-VH4-VL4-VL3-CL-CH1-Fc; VL3-L6-VL4-L7-VH4-L8-VH3; VH3-L6-VH4-L7-VL4-L8-VL3; VL3-L6-VL4-L7-VH4-L8-VH3-Fc; VH3-L6-VH4-L7-VL4-L8-VL3-Fc; VL3-L6-VL4-L7-VH4-L8-VH3-L9-Fc; VH3-L6-VH4-L7-VL4-L8-VL3-L9-Fc; VL3-L6-VL4-L7-VH4-L8-VH3-L9-CH1; VH3-L6- VH4-L7-VL4-L8-VL3-L9-CH1; VL3-L6-VL4-L7-VH4-L8-VH3-L9-CL; VH3-L6-VH4-L7-VL4-L8-VL3-L9-CL; VL3- L6-VL4-L7-VH4-L8-VH3-L9-CH1-L10-CL; VH3-L6-VH4-L7-VL4-L8-VL3-L9-CH1-L10-CL; VL3-L6-VL4-L7-VH4-L8-VH3-L9-CL-L10-CH1; VH3-L6-VH4-L7-VL4-L8-VL3-L9-CL-L10-CH1; VL3-L6-VL4-L7-VH4-L8-VH3-L9-CH1-Fc; VH3-L6-VH4-L7-VL4-L8-VL3-L9-CH1-Fc; VL3-L6-VL4-L7-VH4-L8-VH3-L9-CL-Fc; VH3-L6-VH4-L7-VL4-L8-VL3-L9-CL-Fc; VL3-L6-VL4-L7-VH4-L8-VH3-L9-CH1-L10-CL-Fc; VH3-L6-VH4-L7-VL4-L8-VL3-L9-CH1-L10-CL-Fc; VL3-L6-VL4-L7-VH4-L8-VH3-L9-CL-L10-CH1-Fc; or VH3-L6-VH4-L7-VL4-L8-VL3-L9-CL-L10-CH1-Fc. In some aspects, the first polypeptide has a structure represented by VH1-VH2-VL2-VL1-CH1-Fc, and the second polypeptide has a structure represented by VL3-VL4-VH4-VH3; VH3-VH4-VL4-VL3; VL3-VL4-VH4-VH3-Fc; VH3-VH4-VL4-VL3-Fc; VL3-VL4-VH4-VH3-CH1; VH3-VH4-VL4-VL3-CH1; VL3-VL4-VH4-VH3-CL; VH3-VH4-VL4-VL3-CL; VL3-VL4-VH4-VH3-CH1-CL; VH3-VH4-VL4-VL3-CH1-CL; VL3-VL4-VH4-VH3-CL-CH1; VH3-VH4-VL4-VL3-CL-CH1; VL3-VL4-VH4-VH3-CH1-Fc; VH3-VH4-VL4-VL3-CH1-Fc; VL3-VL4-VH4-VH3-CL-Fc; VH3-VH4-VL4-VL3-CL-Fc; VL3-VL4-VH4-VH3-CH1-CL-Fc; VH3-VH4-VL4-VL3-CH1-CL-Fc; VL3-VL4-VH4-VH3-CL-CH1-Fc; VH3-VH4-VL4-VL3-CL-CH1-Fc; VL3-L6-VL4-L7-VH4-L8-VH3; VH3-L6-VH4-L7-VL4-L8-VL3; VL3-L6-VL4-L7-VH4-L8-VH3-Fc; VH3-L6-VH4-L7-VL4-L8-VL3-Fc; VL3-L6-VL4-L7-VH4-L8-VH3-L9-Fc; VH3-L6-VH4-L7-VL4-L8-VL3-L9-Fc; VL3-L6-VL4-L7-VH4-L8-VH3-L9-CH1; VH3-L6-VH4-L7-VL4-L8-VL3-L9-CH1; VL3-L6-VL4-L7-VH4-L8-VH3-L9-CL; VH3-L6-VH4-L7-VL4-L8-VL3-L9-CL; VL3-L6-VL4-L7-VH4-L8-VH3- L9-CH1-L10-CL; VH3-L6-VH4-L7-VL4-L8-VL3-L9-CH1-L10-CL; VL3-L6-VL4-L7-VH4-L8-VH3-L9-CL-L10-CH1; VH3-L6-VH4-L7-VL4-L8-VL3-L9-CL-L10-CH1; VL3-L6-VL4-L7-VH4-L8-VH3-L9-CH1-Fc; VH3-L6-VH4-L7-VL4-L8-VL3-L9-CH1-Fc; VL3-L6-VL4-L7-VH4-L8-VH3-L9-CL-Fc; VH3-L6-VH4-L7-VL4-L8-VL3-L9-CL-Fc; VL3-L6-VL4-L7-VH4-L8-VH3-L9-CH1-L10-CL-Fc; VH3-L6-VH4-L7-VL4-L8-VL3-L9-CH1-L10-CL-Fc; VL3-L6-VL4-L7-VH4-L8-VH3-L9-CL-L10-CH1-Fc; or VH3-L6-VH4-L7-VL4-L8-VL3-L9-CL-L10-CH1-Fc. In some aspects, the first polypeptide has a structure represented by VL1-VL2-VH2-VH1-CL-Fc, and the second polypeptide has a structure represented by VL3-VL4-VH4-VH3; VH3-VH4-VL4-VL3; VL3-VL4-VH4-VH3-Fc; VH3-VH4-VL4-VL3-Fc; VL3-VL4-VH4-VH3-CH1; VH3-VH4-VL4-VL3-CH1; VL3-VL4-VH4-VH3-CL; VH3-VH4-VL4-VL3-CL; VL3-VL4-VH4-VH3-CH1-CL; VH3-VH4-VL4-VL3-CH1-CL; VL3-VL4-VH4-VH3-CL-CH1; VH3-VH4-VL4-VL3-CL-CH1; VL3-VL4-VH4-VH3-CH1-Fc; VH3-VH4-VL4-VL3-CH1-Fc; VL3-VL4-VH4-VH3-CL-Fc; VH3-VH4-VL4-VL3-CL-Fc; VL3-VL4-VH4-VH3-CH1-CL-Fc; VH3-VH4-VL4-VL3-CH1-CL-Fc; VL3-VL4-VH4-VH3-CL-CH1-Fc; VH3-VH4-VL4-VL3-CL-CH1-Fc; VL3-L6-VL4-L7-VH4-L8-VH3; VH3-L6-VH4-L7-VL4-L8-VL3; VL3-L6-VL4-L7-VH4-L8-VH3-Fc; VH3-L6-VH4-L7-VL4-L8-VL3-Fc; VL3-L6-VL4-L7-VH4-L8-VH3-L9-Fc; VH3-L6-VH4-L7-VL4-L8-VL3-L9-Fe; VL3-L6-VL4-L7-VH4-L8-VH3-L9-CH1; VH3-L6-VH4-L7-VL4-L8-VL3-L9-CH1; VL3-L6-VL4- L7-VH4-L8-VH3-L9-CL; VH3-L6-VH4-L7-VL4-L8-VL3-L9-CL; VL3-L6-VL4-L7-VH4-L8-VH3-L9-CH1-L10-CL; VH3-L6-VH4-L7-VL4-L8-VL3-L9-CH1-L10-CL; VL3-L6-VL4-L7-VH4-L8-VH3-L9-CL-L10-CH1; VH3-L6-VH4-L7-VL4-L8-VL3-L9-CL-L10-CH1; VL3-L6-VL4-L7-VH4-L8-VH3-L9-CH1-Fc; VH3-L6-VH4-L7-VL4-L8-VL3- L9-CH1-Fc; VL3-L6-VL4-L7-VH4-L8-VH3-L9-CL-Fc; VH3-L6-VH4-L7-VL4-L8-VL3-L9-CL-Fc; VL3-L6-VL4-L7-VH4-L8-VH3-L9-CH1-L10-CL-Fc; VH3-L6-VH4-L7-VL4-L8-VL3-L9-CH1-L10-CL-Fc; VL3-L6-VL4-L7-VH4-L8-VH3-L9-CL-L10-CH1-Fc; or VH3-L6-VH4-L7-VL4-L8-VL3-L9-CL-L10-CH1-Fc. In some aspects, the first polypeptide has a structure represented by VH1-VH2-VL2-VL1-CL-Fc, and the second polypeptide has a structure represented by VL3-VL4-VH4-VH3; VH3-VH4-VL4-VL3; VL3-VL4-VH4-VH3-Fc; VH3-VH4-VL4-VL3-Fc; VL3-VL4-VH4-VH3-CH1; VH3-VH4-VL4-VL3-CH1; VL3-VL4-VH4-VH3-CL; VH3-VH4-VL4-VL3-CL; VL3-VL4-VH4-VH3-CH1-CL; VH3-VH4-VL4-VL3-CH1-CL; VL3-VL4-VH4-VH3-CL-CH1; VH3-VH4-VL4-VL3-CL-CH1; VL3-VL4-VH4-VH3-CH1-Fc; VH3-VH4-VL4-VL3-CH1-Fc; VL3-VL4-VH4-VH3-CL-Fc; VH3-VH4-VL4-VL3-CL-Fc; VL3-VL4-VH4-VH3-CH1-CL-Fc; VH3-VH4-VL4-VL3-CH1-CL-Fc; VL3-VL4-VH4-VH3-CL-CH1-Fc; VH3-VH4-VL4-VL3-CL-CH1-Fc; VL3-L6-VL4-L7-VH4-L8-VH3; VH3-L6-VH4-L7-VL4-L8-VL3; VL3-L6-VL4-L7-VH4-L8-VH3-Fc; VH3-L6-VH4-L7-VL4-L8-VL3-Fc; VL3-L6-VL4-L7-VH4-L8-VH3-L9-Fc; VH3-L6-VH4-L7-VL4-L8-VL3-L9-Fc; VL3-L6-VL4-L7-VH4-L8-VH3-L9-CH1; VH3-L6-VH4-L7-VL4-L8-VL3-L9-CH1; VL3-L6-VL4-L7- VH4-L8-VH3-L9-CL; VH3-L6-VH4-L7-VL4-L8-VL3-L9-CL; VL3-L6-VL4-L7-VH4-L8-VH3-L9-CH1-L10-CL; VH3-L6-VH4-L7-VL4-L8-VL3-L9-CH1-L10-CL; VL3-L6-VL4-L7-VH4-L8-VH3-L9-CL-L10-CH1; VH3-L6-VH4-L7-VL4-L8-VL3-L9-CL-L10-CH1; VL3-L6-VL4-L7-VH4-L8-VH3-L9-CH1-Fc; VH3-L6-VH4-L7-VL4-L8-VL3-L9-CH1-Fc; VL3-L6-VL4-L7-VH4-L8-VH3-L9-CL-Fc; VH3-L6-VH4-L7-VL4-L8-VL3-L9-CL-Fc; VL3-L6-VL4-L7-VH4-L8-VH3-L9-CH1-L10-CL-Fc; VH3-L6-VH4-L7-VL4-L8-VL3-L9-CH1-L10-CL-Fc; VL3-L6-VL4-L7-V H4-L8-VH3-L9-CL-L10-CH1-Fc; or VH3-L6-VH4-L7-VL4-L8-VL3-L9-CL-L10-CH1-Fc. In some aspects, the first polypeptide has a structure represented by VL1-VL2-VH2-VH1-CH1-CL-Fc, and the second polypeptide has a structure represented by VL3-VL4-VH4-VH3; VH3-VH4-VL4-VL3; VL3-VL4-VH4-VH3-Fc; VH3-VH4-VL4-VL3-Fc; VL3-VL4-VH4-VH3-CH1; VH3-VH4-VL4-VL3-CH1; VL3-VL4-VH4-VH3-CL; VH3-VH4-VL4-VL3-CL; VL3-VL4-VH4-VH3-CH1-CL; VH3-VH4-VL4-VL3-CH1-CL; VL3-VL4-VH4-VH3-CL-CH1; VH3-VH4-VL4-VL3-CL-CH1; VL3-VL4-VH4-VH3-CH1-Fc; VH3-VH4-VL4-VL3-CH1-Fc; VL3-VL4-VH4-VH3-CL-Fc; VH3-VH4-VL4-VL3-CL-Fc; VL3-VL4-VH4-VH3-CH1-CL-Fc; VH3-VH4-VL4-VL3-CH1-CL-Fc; VL3-VL4-VH4-VH3-CL-CH1-Fc; VH3-VH4-VL4-VL3-CL-CH1-Fc; VL3-L6-VL4-L7-VH4-L8-VH3; VH3-L6-VH4-L7-VL4-L8-VL3; VL3-L6-VL4-L7-VH4-L8-VH3-Fc; VH3-L6-VH4- L7-VL4-L8-VL3-Fc; VL3-L6-VL4-L7-VH4-L8-VH3-L9-Fc; VH3-L6-VH4-L7-VL4-L8-VL3-L9-Fc; VL3-L6-VL4-L7-VH4-L8-VH3-L9-CH1; VH3-L6-VH4-L7-VL4-L8-VL3-L9-CH1; VL3-L6-VL4-L7-VH4-L8-VH3-L9-CL; VH3- L6-VH4-L7-VL4-L8-VL3-L9-CL; VL3-L6-VL4-L7-VH4-L8-VH3-L9-CH1-L10-CL; VH3-L6-VH4-L7-VL4-L8-VL3- L9-CH1-L10-CL; VL3-L6-VL4-L7-VH4-L8-VH3-L9-CL-L10-CH1; VH3-L6-VH4-L7-VL4-L8-VL3-L9-CL-L10-CH1; VL3-L6-VL4-L7-VH4-L8-VH3-L9-CH1-Fc; VH3-L6-VH4-L7-VL4-L8-VL3-L9-CH1-Fe; VL3-L6-VL4-L7-VH4- L8-VH3-L9-CL-Fc; VH3-L6-VH4-L7-VL4-L8-VL3-L9-CL-Fc; VL3-L6-VL4-L7-VH4-L8-VH3-L9-CH1-L10-CL-Fc; VH3-L6-VH4-L7-VL4-L8-VL3-L9-CH1-L10-CL-Fc; VL3-L6-VL4-L7-VH4-L8-VH3-L9-CL-L10-CH1-Fc; or VH3-L6-VH4-L7-VL4-L8-VL3-L9-CL-L10-CH1-Fc. In some aspects, the first polypeptide has a structure represented by VH1-VH2-VL2-VL1-CH1-CL-Fc, and the second polypeptide has a structure represented by VL3-VL4-VH4-VH3; VH3-VH4-VL4-VL3; VL3-VL4-VH4-VH3-Fc; VH3-VH4-VL4-VL3-Fc; VL3-VL4-VH4-VH3-CH1; VH3-VH4-VL4-VL3-CH1; VL3-VL4-VH4-VH3-CL; VH3-VH4-VL4-VL3-CL; VL3-VL4-VH4-VH3-CH1-CL; VH3-VH4-VL4-VL3-CH1-CL; VL3-VL4-VH4-VH3-CL-CH1; VH3-VH4-VL4-VL3-CL-CH1; VL3-VL4-VH4-VH3-CH1-Fc; VH3-VH4-VL4-VL3-CH1-Fc; VL3-VL4-VH4-VH3-CL-Fc; VH3-VH4-VL4-VL3-CL-Fc; VL3-VL4-VH4-VH3-CH1-CL-Fc; VH3-VH4-VL4-VL3-CH1-CL-Fc; VL3-VL4-VH4-VH3-CL-CH1-Fc; VH3-VH4-VL4-VL3-CL-CH1-Fc; VL3-L6-VL4-L7-VH4-L8-VH3; VH3-L6-VH4-L7-VL4-L8-VL3; VL3-L6-VL4-L7-VH4-L8-VH3-Fc; VH3-L6-VH4-L7-VL4- L8-VL3-Fe; VL3-L6-VL4-L7-VH4-L8-VH3-L9-Fc; VH3-L6-VH4-L7-VL4-L8-VL3-L9-Fc; VL3-L6-VL4-L7-VH4-L8-VH3-L9-CH1; VH3-L6-VH4-L7-VL4-L8-VL3-L9-CH1; VL3-L6-VL4-L7-VH4-L8-VH3-L9-CL; VH3-L6-VH4- L7-VL4-L8-VL3-L9-CL; VL3-L6-VL4-L7-VH4-L8-VH3-L9-CH1-L10-CL; VH3-L6-VH4-L7-VL4-L8-VL3-L9-CH1- L10-CL; VL3-L6-VL4-L7-VH4-L8-VH3-L9-CL-L10-CH1; VH3-L6-VH4-L7-VL4-L8-VL3-L9-CL-L10-CH1; VL3-L6-VL4-L7-VH4-L8-VH3-L9-CH1-Fc; VH3-L6-VH4-L7-VL4-L8-VL3-L9-CH1-Fc; VL3-L6-VL4-L7-VH4-L8-VH3- L9-CL-Fc; VH3-L6-VH4-L7-VL4-L8-VL3-L9-CL-Fc; VL3-L6-VL4-L7-VH4-L8-VH3-L9-CH1-L10-CL-Fc; VH3-L6-VH4-L7-VL4-L8-VL3-L9-CH1-L10-CL-Fc; VL3-L6-VL4-L7-VH4-L8-VH3-L9-CL-L10-CH1-Fc; or VH3-L6-VH4-L7-VL4-L8-VL3-L9-CL-L10-CH1-Fc. In some aspects, the first polypeptide has a structure represented by VL1-VL2-VH2-VH1-CL-CH1-Fc, and the second polypeptide has a structure represented by VL3-VL4-VH4-VH3; VH3-VH4-VL4-VL3; VL3-VL4-VH4-VH3-Fc; VH3-VH4-VL4-VL3-Fc; VL3-VL4-VH4-VH3-CH1; VH3-VH4-VL4-VL3-CH1; VL3-VL4-VH4-VH3-CL; VH3-VH4-VL4-VL3-CL; VL3-VL4-VH4-VH3-CH1-CL; VH3-VH4-VL4-VL3-CH1-CL; VL3-VL4-VH4-VH3-CL-CH1; VH3-VH4-VL4-VL3-CL-CH1; VL3-VL4-VH4-VH3-CH1-Fc; VH3-VH4-VL4-VL3-CH1-Fc; VL3-VL4-VH4-VH3-CL-Fc; VH3-VH4-VL4-VL3-CL-Fc; VL3-VL4-VH4-VH3-CH1-CL-Fc; VH3-VH4-VL4-VL3-CH1-CL-Fc; VL3-VL4-VH4-VH3-CL-CH1-Fc; VH3-VH4-VL4-VL3-CL-CH1-Fc; VL3-L6-VL4-L7-VH4-L8-VH3; VH3-L6-VH4-L7-VL4-L8-VL3; VL3-L6-VL4-L7-VH4-L8-VH3-Fc; VH3-L6-VH4-L7-VL4-L8-VL3- Fc; VL3-L6-VL4-L7-VH4-L8-VH3-L9-Fc; VH3-L6-VH4-L7-VL4-L8-VL3-L9-Fc; VL3-L6-VL4-L7-VH4-L8-VH3- L9-CH1; VH3-L6-VH4-L7-VL4-L8-VL3-L9-CH1; VL3-L6-VL4-L7-VH4-L8-VH3-L9-CL; VH3-L6-VH4-L7-VL4- L8-VL3-L9-CL; VL3-L6-VL4-L7-VH4-L8-VH3-L9-CH1-L10-CL; VH3-L6-VH4-L7-VL4-L8-VL3-L9-CH1-L10-CL; VL3-L6-VL4-L7-VH4-L8-VH3-L9-CL-L10-CH1; VH3-L6-VH4-L7-VL4-L8-VL3-L9-CL-L10-CH1; VL3-L6-VL4- L7-VH4-L8-VH3-L9-CH1-Fc; VH3-L6-VH4-L7-VL4-L8-VL3-L9-CH1-Fc; VL3-L6-VL4-L7-VH4-L8-VH3-L9-CL-Fc; VH3-L6-VH4-L7-VL4-L8-VL3-L9-CL-Fc; VL3-L6-VL4-L7-VH4-L8-VH3-L9-CH1-L10-CL-Fc; VH3-L6-VH4-L7-VL4-L8-VL3-L9-CH1-L10-CL-Fc; VL3-L6-VL4-L7-VH4-L8-VH3-L9-CL-L10-CH1-Fc; or VH3-L6-VH4-L7-VL4-L8-VL3-L9-CL-L10-CH1-Fc. In some aspects, the first polypeptide has a structure represented by VH1-VH2-VL2-VL1-CL-CH1-Fc, and the second polypeptide has a structure represented by VL3-VL4-VH4-VH3; VH3-VH4-VL4-VL3; VL3-VL4-VH4-VH3-Fc; VH3-VH4-VL4-VL3-Fc; VL3-VL4-VH4-VH3-CH1; VH3-VH4-VL4-VL3-CH1; VL3-VL4-VH4-VH3-CL; VH3-VH4-VL4-VL3-CL; VL3-VL4-VH4-VH3-CH1-CL; VH3-VH4-VL4-VL3-CH1-CL; VL3-VL4-VH4-VH3-CL-CH1; VH3-VH4-VL4-VL3-CL-CH1; VL3-VL4-VH4-VH3-CH1-Fc; VH3-VH4-VL4-VL3-CH1-Fc; VL3-VL4-VH4-VH3-CL-Fc; VH3-VH4-VL4-VL3-CL-Fc; VL3-VL4-VH4-VH3-CH1-CL-Fc; VH3-VH4-VL4-VL3-CH1-CL-Fc; VL3-VL4-VH4-VH3-CL-CH1-Fc; VH3-VH4-VL4-VL3-CL-CH1-Fc; VL3-L6-VL4-L7-VH4-L8-VH3; VH3-L6-VH4-L7-VL4-L8-VL3; VL3-L6-VL4-L7-VH4-L8-VH3-Fc; VH3-L6-VH4-L7-VL4-L8-VL3-Fc; VL3-L6-VL4-L7-VH4-L8-VH3-L9-Fe; VH3-L6-VH4-L7-VL4-L8-VL3-L9-Fc; VL3-L6-VL4-L7-VH4-L8-VH3-L9-CH1; VH3-L6-VH4-L7-VL4-L8-VL3-L9-CH1; VL3-L6-VL4-L7-VH4-L8-VH3-L9-CL; VH3-L6-VH4-L7-VL4-L8-VL3-L9-CL; VL3-L6-VL4-L7-VH4-L8-VH3-L9-CH1-L10-CL; VH3-L6-VH4-L7-VL4-L8-VL3-L9-CH1-L10-CL; VL3-L6-VL4- L7-VH4-L8-VH3-L9-CL-L10-CH1; VH3-L6-VH4-L7-VL4-L8-VL3-L9-CL-L10-CH1; VL3-L6-VL4-L7-VH4-L8-VH3-L9-CH1-Fc; VH3-L6-VH4-L7-VL4-L8-VL3-L9-CH1-Fe; VL3-L6-VL4-L7-VH4-L8-VH3-L9-CL-Fc; VH3-L6-VH4-L7-VL4-L8-VL3-L9-CL-Fc; VL3-L6-VL4-L7-VH4-L8-VH3-L9-CH1-L10-CL-Fc; VH3-L6-VH4-L7-VL4-L8-VL3-L9-CH1-L10-CL-Fc; VL3-L6-VL4-L7-VH4-L8-VH3-L9-CL-L10-CH1-Fc; or VH3-L6-VH4-L7-VL4-L8-VL3-L9-CL-L10-CH1-Fc. In some aspects, the first polypeptide has a structure represented by VL1-L1-VL2-L2-VH2-L3-VH1, and the second polypeptide has a structure represented by VL3-VL4-VH4-VH3; VH3-VH4-VL4-VL3; VL3-VL4-VH4-VH3-Fc; VH3-VH4-VL4-VL3-Fc; VL3-VL4-VH4-VH3-CH1; VH3-VH4-VL4-VL3-CH1; VL3-VL4-VH4-VH3-CL; VH3-VH4-VL4-VL3-CL; VL3-VL4-VH4-VH3-CH1-CL; VH3-VH4-VL4-VL3-CH1-CL; VL3-VL4-VH4-VH3-CL-CH1; VH3-VH4-VL4-VL3-CL-CH1; VL3-VL4-VH4-VH3-CH1-Fc; VH3-VH4-VL4-VL3-CH1-Fc; VL3-VL4-VH4-VH3-CL-Fc; VH3-VH4-VL4-VL3-CL-Fc; VL3-VL4-VH4-VH3-CH1-CL-Fc; VH3-VH4-VL4-VL3-CH1-CL-Fc; VL3-VL4-VH4-VH3-CL-CH1-Fc; VH3-VH4-VL4-VL3-CL-CH1-Fc; VL3-L6-VL4-L7-VH4-L8-VH3; VH3-L6-VH4-L7-VL4-L8-VL3; VL3-L6-VL4-L7-VH4-L8-VH3-Fc; VH3-L6-VH4-L7-VL4-L8-VL3-Fc; VL3-L6-VL4-L7-VH4-L8-VH3-L9-Fc; VH3-L6-VH4-L7-VL4-L8-VL3-L9-Fc; VL3-L6-VL4-L7-VH4-L8-VH3-L9-CH1; VH3-L6-VH4-L7-VL4-L8-VL3-L9-CH1; VL3-L6-VL4-L7-VH4-L8-VH3-L9-CL; VH3-L6-VH4-L7-VL4-L8-VL3-L9-CL; VL3-L6-VL4-L7-VH4-L8-VH3- L9-CH1-L10-CL; VH3-L6-VH4-L7-VL4-L8-VL3-L9-CH1-L10-CL; VL3-L6-VL4-L7-VH4-L8-VH3-L9-CL-L10-CH1; VH3-L6-VH4-L7-VL4-L8-VL3-L9-CL-L10-CH1; VL3-L6-VL4-L7-VH4-L8-VH3-L9-CH1-Fc; VH3-L6-VH4-L7-VL4-L8-VL3-L9-CH1-Fc; VL3-L6-VL4-L7-VH4-L8-VH3-L9-CL-Fc; VH3-L6-VH4-L7-VL4-L8-VL3-L9-CL-Fc; VL3-L6-VL4-L7-VH4-L8-VH3-L9-CH1-L10-CL-Fc; VH3-L6-VH4-L7-VL4-L8-VL3-L9-CH1-L10-CL-Fc; VL3-L6-VL4-L7-VH4-L8-VH3-L9-CL-L10-CH1-Fc; or VH3-L6-VH4-L7-VL4-L8-VL3-L9-CL-L10-CH1-Fc. In some aspects, the first polypeptide has a structure represented by VH1-L1-VH2-L2-VL2-L3-VL1, and the second polypeptide has a structure represented by VL3-VL4-VH4-VH3; VH3-VH4-VL4-VL3; VL3-VL4-VH4-VH3-Fc; VH3-VH4-VL4-VL3-Fc; VL3-VL4-VH4-VH3-CH1; VH3-VH4-VL4-VL3-CH1; VL3-VL4-VH4-VH3-CL; VH3-VH4-VL4-VL3-CL; VL3-VL4-VH4-VH3-CH1-CL; VH3-VH4-VL4-VL3-CH1-CL; VL3-VL4-VH4-VH3-CL-CH1; VH3-VH4-VL4-VL3-CL-CH1; VL3-VL4-VH4-VH3-CH1-Fc; VH3-VH4-VL4-VL3-CH1-Fc; VL3-VL4-VH4-VH3-CL-Fc; VH3-VH4-VL4-VL3-CL-Fc; VL3-VL4-VH4-VH3-CH1-CL-Fc; VH3-VH4-VL4-VL3-CH1-CL-Fc; VL3-VL4-VH4-VH3-CL-CH1-Fc; VH3-VH4-VL4-VL3-CL-CH1-Fc; VL3-L6-VL4-L7-VH4-L8-VH3; VH3-L6-VH4-L7-VL4-L8-VL3; VL3-L6-VL4-L7-VH4-L8-VH3-Fc; VH3-L6-VH4-L7-VL4-L8-VL3-Fc; VL3-L6-VL4-L7-VH4-L8-VH3-L9-Fc; VH3-L6-VH4-L7-VL4-L8-VL3-L9-Fe; VL3-L6-VL4-L7-VH4-L8-VH3-L9-CH1; VH3-L6-VH4-L7-VL4-L8-VL3-L9-CH1; VL3-L6-VL4- L7-VH4-L8-VH3-L9-CL; VH3-L6-VH4-L7-VL4-L8-VL3-L9-CL; VL3-L6-VL4-L7-VH4-L8-VH3-L9-CH1-L10-CL; VH3-L6-VH4-L7-VL4-L8-VL3-L9-CH1-L10-CL; VL3-L6-VL4-L7-VH4-L8-VH3-L9-CL-L10-CH1; VH3-L6-VH4-L7-VL4-L8-VL3-L9-CL-L10-CH1; VL3-L6-VL4-L7-VH4-L8-VH3-L9-CH1-Fc; VH3-L6-VH4-L7-VL4-L8-VL3- L9-CH1-Fc; VL3-L6-VL4-L7-VH4-L8-VH3-L9-CL-Fc; VH3-L6-VH4-L7-VL4-L8-VL3-L9-CL-Fc; VL3-L6-VL4-L7-VH4-L8-VH3-L9-CH1-L10-CL-Fc; VH3-L6-VH4-L7-VL4-L8-VL3-L9-CH1-L10-CL-Fc; VL3-L6-VL4-L7-VH4-L8-VH3-L9-CL-L10-CH1-Fc; or VH3-L6-VH4-L7-VL4-L8-VL3-L9-CL-L10-CH1-Fc. In some aspects, the first polypeptide has a structure represented by VL1-L1-VL2-L2-VH2-L3-VH1-Fc, and the second polypeptide has a structure represented by VL3-VL4-VH4-VH3; VH3-VH4-VL4-VL3; VL3-VL4-VH4-VH3-Fc; VH3-VH4-VL4-VL3-Fc; VL3-VL4-VH4-VH3-CH1; VH3-VH4-VL4-VL3-CH1; VL3-VL4-VH4-VH3-CL; VH3-VH4-VL4-VL3-CL; VL3-VL4-VH4-VH3-CH1-CL; VH3-VH4-VL4-VL3-CH1-CL; VL3-VL4-VH4-VH3-CL-CH1; VH3-VH4-VL4-VL3-CL-CH1; VL3-VL4-VH4-VH3-CH1-Fc; VH3-VH4-VL4-VL3-CH1-Fc; VL3-VL4-VH4-VH3-CL-Fc; VH3-VH4-VL4-VL3-CL-Fc; VL3-VL4-VH4-VH3-CH1-CL-Fc; VH3-VH4-VL4-VL3-CH1-CL-Fc; VL3-VL4-VH4-VH3-CL-CH1-Fc; VH3-VH4-VL4-VL3-CL-CH1-Fc; VL3-L6-VL4-L7-VH4-L8-VH3; VH3-L6-VH4-L7-VL4-L8-VL3; VL3-L6-VL4-L7-VH4-L8-VH3-Fc; VH3-L6-VH4-L7-VL4-L8-VL3-Fc; VL3-L6-VL4-L7-VH4-L8-VH3-L9-Fc; VH3-L6-VH4-L7-VL4-L8-VL3-L9-Fe; VL3-L6-VL4-L7-VH4-L8-VH3-L9-CH1; VH3-L6-VH4-L7-VL4-L8-VL3-L9-CH1; VL3-L6-VL4- L7-VH4-L8-VH3-L9-CL; VH3-L6-VH4-L7-VL4-L8-VL3-L9-CL; VL3-L6-VL4-L7-VH4-L8-VH3-L9-CH1-L10-CL; VH3-L6-VH4-L7-VL4-L8-VL3-L9-CH1-L10-CL; VL3-L6-VL4-L7-VH4-L8-VH3-L9-CL-L10-CH1; VH3-L6-VH4-L7-VL4-L8-VL3-L9-CL-L10-CH1; VL3-L6-VL4-L7-VH4-L8-VH3-L9-CH1-Fc; VH3-L6-VH4-L7-VL4-L8-VL3- L9-CH1-Fc; VL3-L6-VL4-L7-VH4-L8-VH3-L9-CL-Fc; VH3-L6-VH4-L7-VL4-L8-VL3-L9-CL-Fc; VL3-L6-VL4-L7-VH4-L8-VH3-L9-CH1-L10-CL-Fc; VH3-L6-VH4-L7-VL4-L8-VL3-L9-CH1-L10-CL-Fc; VL3-L6-VL4-L7-VH4-L8-VH3-L9-CL-L10-CH1-Fc; or VH3-L6-VH4-L7-VL4-L8-VL3-L9-CL-L10-CH1-Fc. In some aspects, the first polypeptide has a structure represented by VH1-L1-VH2-L2-VL2-L3-VL1-Fc, and the second polypeptide has a structure represented by VL3-VL4-VH4-VH3; VH3-VH4-VL4-VL3; VL3-VL4-VH4-VH3-Fc; VH3-VH4-VL4-VL3-Fc; VL3-VL4-VH4-VH3-CH1; VH3-VH4-VL4-VL3-CH1; VL3-VL4-VH4-VH3-CL; VH3-VH4-VL4-VL3-CL; VL3-VL4-VH4-VH3-CH1-CL; VH3-VH4-VL4-VL3-CH1-CL; VL3-VL4-VH4-VH3-CL-CH1; VH3-VH4-VL4-VL3-CL-CH1; VL3-VL4-VH4-VH3-CH1-Fc; VH3-VH4-VL4-VL3-CH1-Fc; VL3-VL4-VH4-VH3-CL-Fc; VH3-VH4-VL4-VL3-CL-Fc; VL3-VL4-VH4-VH3-CH1-CL-Fc; VH3-VH4-VL4-VL3-CH1-CL-Fc; VL3-VL4-VH4-VH3-CL-CH1-Fc; VH3-VH4-VL4-VL3-CL-CH1-Fc; VL3-L6-VL4-L7-VH4-L8-VH3; VH3-L6-VH4-L7-VL4-L8-VL3; VL3-L6-VL4-L7-VH4-L8-VH3-Fc; VH3-L6-VH4-L7-VL4-L8-VL3-Fc; VL3-L6-VL4-L7-VH4-L8-VH3-L9-Fc; VH3-L6-VH4-L7-VL4-L8-VL3-L9-Fe; VL3-L6-VL4-L7-VH4-L8-VH3-L9-CH1; VH3-L6-VH4-L7-VL4-L8-VL3-L9-CH1; VL3-L6-VL4- L7-VH4-L8-VH3-L9-CL; VH3-L6-VH4-L7-VL4-L8-VL3-L9-CL; VL3-L6-VL4-L7-VH4-L8-VH3-L9-CH1-L10-CL; VH3-L6-VH4-L7-VL4-L8-VL3-L9-CH1-L10-CL; VL3-L6-VL4-L7-VH4-L8-VH3-L9-CL-L10-CH1; VH3-L6-VH4-L7-VL4-L8-VL3-L9-CL-L10-CH1; VL3-L6-VL4-L7-VH4-L8-VH3-L9-CH1-Fc; VH3-L6-VH4-L7-VL4-L8-VL3- L9-CH1-Fc; VL3-L6-VL4-L7-VH4-L8-VH3-L9-CL-Fc; VH3-L6-VH4-L7-VL4-L8-VL3-L9-CL-Fc; VL3-L6-VL4-L7-VH4-L8-VH3-L9-CH1-L10-CL-Fc; VH3-L6-VH4-L7-VL4-L8-VL3-L9-CH1-L10-CL-Fc; VL3-L6-VL4-L7-VH4-L8-VH3-L9-CL-L10-CH1-Fc; or VH3-L6-VH4-L7-VL4-L8-VL3-L9-CL-L10-CH1-Fc. In some aspects, the first polypeptide has a structure represented by VL1-L1-VL2-L2-VH2-L3-VH1-L4-Fc, and the second polypeptide has a structure represented by VL3-VL4-VH4-VH3; VH3-VH4-VL4-VL3; VL3-VL4-VH4-VH3-Fc; VH3-VH4-VL4-VL3-Fc; VL3-VL4-VH4-VH3-CH1; VH3-VH4-VL4-VL3-CH1; VL3-VL4-VH4-VH3-CL; VH3-VH4-VL4-VL3-CL; VL3-VL4-VH4-VH3-CH1-CL; VH3-VH4-VL4-VL3-CH1-CL; VL3-VL4-VH4-VH3-CL-CH1; VH3-VH4-VL4-VL3-CL-CH1; VL3-VL4-VH4-VH3-CH1-Fc; VH3-VH4-VL4-VL3-CH1-Fc; VL3-VL4-VH4-VH3-CL-Fc; VH3-VH4-VL4-VL3-CL-Fc; VL3-VL4-VH4-VH3-CH1-CL-Fc; VH3-VH4-VL4-VL3-CH1-CL-Fc; VL3-VL4-VH4-VH3-CL-CH1-Fc; VH3-VH4-VL4-VL3-CL-CH1-Fc; VL3-L6-VL4-L7-VH4-L8-VH3; VH3-L6-VH4-L7-VL4-L8-VL3; VL3-L6-VL4-L7-VH4-L8-VH3-Fc; VH3-L6-VH4-L7-VL4-L8-VL3-Fc; VL3-L6-VL4-L7-VH4-L8-VH3-L9-Fc; VH3-L6-VH4-L7-VL4-L8-VL3-L9-Fc; VL3-L6-VL4-L7-VH4-L8-VH3-L9-CH1; VH3-L6-VH4-L7-VL4-L8-VL3-L9-CH1; VL3-L6-VL4- L7-VH4-L8-VH3-L9-CL; VH3-L6-VH4-L7-VL4-L8-VL3-L9-CL; VL3-L6-VL4-L7-VH4-L8-VH3-L9-CH1-L10-CL; VH3-L6-VH4-L7-VL4-L8-VL3-L9-CH1-L10-CL; VL3-L6-VL4-L7-VH4-L8-VH3-L9-CL-L10-CH1; VH3-L6-VH4-L7-VL4-L8-VL3-L9-CL-L10-CH1; VL3-L6-VL4-L7-VH4-L8-VH3-L9-CH1-Fc; VH3-L6-VH4-L7-VL4-L8-VL3- L9-CH1-Fc; VL3-L6-VL4-L7-VH4-L8-VH3-L9-CL-Fc; VH3-L6-VH4-L7-VL4-L8-VL3-L9-CL-Fc; VL3-L6-VL4-L7-VH4-L8-VH3-L9-CH1-L10-CL-Fc; VH3-L6-VH4-L7-VL4-L8-VL3-L9-CH1-L10-CL-Fc; VL3-L6-VL4-L7-VH4-L8-VH3-L9-CL-L10-CH1-Fc; or VH3-L6-VH4-L7-VL4-L8-VL3-L9-CL-L10-CH1-Fc. In some aspects, the first polypeptide has a structure represented by VH1-L1-VH2-L2-VL2-L3-VL1-L4-Fc, and the second polypeptide has a structure represented by VL3-VL4-VH4-VH3; VH3-VH4-VL4-VL3; VL3-VL4-VH4-VH3-Fc; VH3-VH4-VL4-VL3-Fc; VL3-VL4-VH4-VH3-CH1; VH3-VH4-VL4-VL3-CH1; VL3-VL4-VH4-VH3-CL; VH3-VH4-VL4-VL3-CL; VL3-VL4-VH4-VH3-CH1-CL; VH3-VH4-VL4-VL3-CH1-CL; VL3-VL4-VH4-VH3-CL-CH1; VH3-VH4-VL4-VL3-CL-CH1; VL3-VL4-VH4-VH3-CH1-Fc; VH3-VH4-VL4-VL3-CH1-Fc; VL3-VL4-VH4-VH3-CL-Fc; VH3-VH4-VL4-VL3-CL-Fc; VL3-VL4-VH4-VH3-CH1-CL-Fc; VH3-VH4-VL4-VL3-CH1-CL-Fc; VL3-VL4-VH4-VH3-CL-CH1-Fc; VH3-VH4-VL4-VL3-CL-CH1-Fc; VL3-L6-VL4-L7-VH4-L8-VH3; VH3-L6-VH4-L7-VL4-L8-VL3; VL3-L6-VL4-L7-VH4-L8-VH3-Fc; VH3-L6-VH4-L7-VL4-L8-VL3-Fc; VL3-L6-VL4-L7-VH4-L8-VH3-L9-Fc; VH3-L6-VH4-L7-VL4-L8-VL3-L9-Fc; VL3-L6-VL4-L7-VH4-L8-VH3-L9-CH1; VH3-L6-VH4-L7-VL4-L8-VL3-L9-CH1; VL3-L6-VL4- L7-VH4-L8-VH3-L9-CL; VH3-L6-VH4-L7-VL4-L8-VL3-L9-CL; VL3-L6-VL4-L7-VH4-L8-VH3-L9-CH1-L10-CL; VH3-L6-VH4-L7-VL4-L8-VL3-L9-CH1-L10-CL; VL3-L6-VL4-L7-VH4-L8-VH3-L9-CL-L10-CH1; VH3-L6-VH4-L7-VL4-L8-VL3-L9-CL-L10-CH1; VL3-L6-VL4-L7-VH4-L8-VH3-L9-CH1-Fc; VH3-L6-VH4-L7-VL4-L8-VL3- L9-CH1-Fc; VL3-L6-VL4-L7-VH4-L8-VH3-L9-CL-Fc; VH3-L6-VH4-L7-VL4-L8-VL3-L9-CL-Fc; VL3-L6-VL4-L7-VH4-L8-VH3-L9-CH1-L10-CL-Fc; VH3-L6-VH4-L7-VL4-L8-VL3-L9-CH1-L10-CL-Fc; VL3-L6-VL4-L7-VH4-L8-VH3-L9-CL-L10-CH1-Fc; or VH3-L6-VH4-L7-VL4-L8-VL3-L9-CL-L10-CH1-Fc. In some aspects, the first polypeptide has a structure represented by VL1-L1-VL2-L2-VH2-L3-VH1-L4-CH1, and the second polypeptide has a structure represented by VL3-VL4-VH4-VH3; VH3-VH4-VL4-VL3; VL3-VL4-VH4-VH3-Fc; VH3-VH4-VL4-VL3-Fc; VL3-VL4-VH4-VH3-CH1; VH3-VH4-VL4-VL3-CH1; VL3-VL4-VH4-VH3-CL; VH3-VH4-VL4-VL3-CL; VL3-VL4-VH4-VH3-CH1-CL; VH3-VH4-VL4-VL3-CH1-CL; VL3-VL4-VH4-VH3-CL-CH1; VH3-VH4-VL4-VL3-CL-CH1; VL3-VL4-VH4-VH3-CH1-Fc; VH3-VH4-VL4-VL3-CH1-Fc; VL3-VL4-VH4-VH3-CL-Fc; VH3-VH4-VL4-VL3-CL-Fc; VL3-VL4-VH4-VH3-CH1-CL-Fc; VH3-VH4-VL4-VL3-CH1-CL-Fc; VL3-VL4-VH4-VH3-CL-CH1-Fc; VH3-VH4-VL4-VL3-CL-CH1-Fc; VL3-L6-VL4-L7-VH4-L8-VH3; VH3-L6-VH4-L7-VL4-L8-VL3; VL3-L6-VL4-L7-VH4-L8-VH3-Fc; VH3-L6-VH4-L7-VL4-L8-VL3-Fc; VL3-L6-VL4-L7-VH4-L8-VH3-L9-Fc; VH3-L6-VH4-L7-VL4-L8-VL3-L9-Fc; VL3-L6-VL4-L7-VH4-L8-VH3-L9-CH1; VH3-L6-VH4-L7-VL4-L8-VL3-L9-CH1; VL3-L6-VL4- L7-VH4-L8-VH3-L9-CL; VH3-L6-VH4-L7-VL4-L8-VL3-L9-CL; VL3-L6-VL4-L7-VH4-L8-VH3-L9-CH1-L10-CL; VH3-L6-VH4-L7-VL4-L8-VL3-L9-CH1-L10-CL; VL3-L6-VL4-L7-VH4-L8-VH3-L9-CL-L10-CH1; VH3-L6-VH4-L7-VL4-L8-VL3-L9-CL-L10-CH1; VL3-L6-VL4-L7-VH4-L8-VH3-L9-CH1-Fc; VH3-L6-VH4-L7-VL4-L8-VL3- L9-CH1-Fc; VL3-L6-VL4-L7-VH4-L8-VH3-L9-CL-Fc; VH3-L6-VH4-L7-VL4-L8-VL3-L9-CL-Fc; VL3-L6-VL4-L7-VH4-L8-VH3-L9-CH1-L10-CL-Fc; VH3-L6-VH4-L7-VL4-L8-VL3-L9-CH1-L10-CL-Fc; VL3-L6-VL4-L7-VH4-L8-VH3-L9-CL-L10-CH1-Fc; or VH3-L6-VH4-L7-VL4-L8-VL3-L9-CL-L10-CH1-Fc. In some aspects, the first polypeptide has a structure represented by VH1-L1-VH2-L2-VL2-L3-VL1-L4-CH1, and the second polypeptide has a structure represented by VL3-VL4-VH4-VH3; VH3-VH4-VL4-VL3; VL3-VL4-VH4-VH3-Fc; VH3-VH4-VL4-VL3-Fc; VL3-VL4-VH4-VH3-CH1; VH3-VH4-VL4-VL3-CH1; VL3-VL4-VH4-VH3-CL; VH3-VH4-VL4-VL3-CL; VL3-VL4-VH4-VH3-CH1-CL; VH3-VH4-VL4-VL3-CH1-CL; VL3-VL4-VH4-VH3-CL-CH1; VH3-VH4-VL4-VL3-CL-CH1; VL3-VL4-VH4-VH3-CH1-Fc; VH3-VH4-VL4-VL3-CH1-Fc; VL3-VL4-VH4-VH3-CL-Fc; VH3-VH4-VL4-VL3-CL-Fc; VL3-VL4-VH4-VH3-CH1-CL-Fc; VH3-VH4-VL4-VL3-CH1-CL-Fc; VL3-VL4-VH4-VH3-CL-CH1-Fc; VH3-VH4-VL4-VL3-CL-CH1-Fc; VL3-L6-VL4-L7-VH4-L8-VH3; VH3-L6-VH4-L7-VL4-L8-VL3; VL3-L6-VL4-L7-VH4-L8-VH3-Fc; VH3-L6-VH4-L7-VL4-L8-VL3-Fc; VL3-L6-VL4-L7-VH4-L8-VH3-L9-Fc; VH3-L6-VH4-L7-VL4-L8-VL3-L9-Fc; VL3-L6-VL4-L7-VH4-L8-VH3-L9-CH1; VH3-L6-VH4-L7-VL4-L8-VL3-L9-CH1; VL3-L6-VL4- L7-VH4-L8-VH3-L9-CL; VH3-L6-VH4-L7-VL4-L8-VL3-L9-CL; VL3-L6-VL4-L7-VH4-L8-VH3-L9-CH1-L10-CL; VH3-L6-VH4-L7-VL4-L8-VL3-L9-CH1-L10-CL; VL3-L6-VL4-L7-VH4-L8-VH3-L9-CL-L10-CH1; VH3-L6-VH4-L7-VL4-L8-VL3-L9-CL-L10-CH1; VL3-L6-VL4-L7-VH4-L8-VH3-L9-CH1-Fc; VH3-L6-VH4-L7-VL4-L8-VL3- L9-CH1-Fc; VL3-L6-VL4-L7-VH4-L8-VH3-L9-CL-Fc; VH3-L6-VH4-L7-VL4-L8-VL3-L9-CL-Fc; VL3-L6-VL4-L7-VH4-L8-VH3-L9-CH1-L10-CL-Fc; VH3-L6-VH4-L7-VL4-L8-VL3-L9-CH1-L10-CL-Fc; VL3-L6-VL4-L7-VH4-L8-VH3-L9-CL-L10-CH1-Fc; or VH3-L6-VH4-L7-VL4-L8-VL3-L9-CL-L10-CH1-Fc. In some aspects, the first polypeptide has a structure represented by VL1-L1-VL2-L2-VH2-L3-VH1-L4-CL, and the second polypeptide has a structure represented by VL3-VL4-VH4-VH3; VH3-VH4-VL4-VL3; VL3-VL4-VH4-VH3-Fc; VH3-VH4-VL4-VL3-Fc; VL3-VL4-VH4-VH3-CH1; VH3-VH4-VL4-VL3-CH1; VL3-VL4-VH4-VH3-CL; VH3-VH4-VL4-VL3-CL; VL3-VL4-VH4-VH3-CH1-CL; VH3-VH4-VL4-VL3-CH1-CL; VL3-VL4-VH4-VH3-CL-CH1; VH3-VH4-VL4-VL3-CL-CH1; VL3-VL4-VH4-VH3-CH1-Fc; VH3-VH4-VL4-VL3-CH1-Fc; VL3-VL4-VH4-VH3-CL-Fc; VH3-VH4-VL4-VL3-CL-Fc; VL3-VL4-VH4-VH3-CH1-CL-Fc; VH3-VH4-VL4-VL3-CH1-CL-Fc; VL3-VL4-VH4-VH3-CL-CH1-Fc; VH3-VH4-VL4-VL3-CL-CH1-Fc; VL3-L6-VL4-L7-VH4-L8-VH3; VH3-L6-VH4-L7-VL4-L8-VL3; VL3-L6-VL4-L7-VH4-L8-VH3-Fc; VH3-L6-VH4-L7-VL4-L8-VL3-Fc; VL3-L6-VL4-L7-VH4-L8-VH3-L9-Fc; VH3-L6-VH4-L7-VL4-L8-VL3-L9-Fc; VL3-L6-VL4-L7-VH4-L8-VH3-L9-CH1; VH3-L6-VH4-L7-VL4-L8-VL3-L9-CH1; VL3-L6-VL4- L7-VH4-L8-VH3-L9-CL; VH3-L6-VH4-L7-VL4-L8-VL3-L9-CL; VL3-L6-VL4-L7-VH4-L8-VH3-L9-CH1-L10-CL; VH3-L6-VH4-L7-VL4-L8-VL3-L9-CH1-L10-CL; VL3-L6-VL4-L7-VH4-L8-VH3-L9-CL-L10-CH1; VH3-L6-VH4-L7-VL4-L8-VL3-L9-CL-L10-CH1; VL3-L6-VL4-L7-VH4-L8-VH3-L9-CH1-Fc; VH3-L6-VH4-L7-VL4-L8-VL3- L9-CH1-Fc; VL3-L6-VL4-L7-VH4-L8-VH3-L9-CL-Fc; VH3-L6-VH4-L7-VL4-L8-VL3-L9-CL-Fc; VL3-L6-VL4-L7-VH4-L8-VH3-L9-CH1-L10-CL-Fc; VH3-L6-VH4-L7-VL4-L8-VL3-L9-CH1-L10-CL-Fc; VL3-L6-VL4-L7-VH4-L8-VH3-L9-CL-L10-CH1-Fc; or VH3-L6-VH4-L7-VL4-L8-VL3-L9-CL-L10-CH1-Fe. In some aspects, the first polypeptide has a structure represented by VH1-L1-VH2-L2-VL2-L3-VL1-L4-CL, and the second polypeptide has a structure represented by VL3-VL4-VH4-VH3; VH3-VH4-VL4-VL3; VL3-VL4-VH4-VH3-Fc; VH3-VH4-VL4-VL3-Fc; VL3-VL4-VH4-VH3-CH1; VH3-VH4-VL4-VL3-CH1; VL3-VL4-VH4-VH3-CL; VH3-VH4-VL4-VL3-CL; VL3-VL4-VH4-VH3-CH1-CL; VH3-VH4-VL4-VL3-CH1-CL; VL3-VL4-VH4-VH3-CL-CH1; VH3-VH4-VL4-VL3-CL-CH1; VL3-VL4-VH4-VH3-CH1-Fc; VH3-VH4-VL4-VL3-CH1-Fc; VL3-VL4-VH4-VH3-CL-Fc; VH3-VH4-VL4-VL3-CL-Fc; VL3-VL4-VH4-VH3-CH1-CL-Fc; VH3-VH4-VL4-VL3-CH1-CL-Fc; VL3-VL4-VH4-VH3-CL-CH1-Fc; VH3-VH4-VL4-VL3-CL-CH1-Fc; VL3-L6-VL4-L7-VH4-L8-VH3; VH3-L6-VH4-L7-VL4-L8-VL3; VL3-L6-VL4-L7-VH4-L8-VH3-Fc; VH3-L6-VH4-L7-VL4-L8-VL3-Fc; VL3-L6-VL4-L7-VH4-L8-VH3-L9-Fc; VH3-L6-VH4-L7-VL4-L8-VL3-L9-Fc; VL3-L6-VL4-L7-VH4-L8-VH3-L9-CH1; VH3-L6-VH4-L7-VL4-L8-VL3-L9-CH1; VL3-L6-VL4- L7-VH4-L8-VH3-L9-CL; VH3-L6-VH4-L7-VL4-L8-VL3-L9-CL; VL3-L6-VL4-L7-VH4-L8-VH3-L9-CH1-L10-CL; VH3-L6-VH4-L7-VL4-L8-VL3-L9-CH1-L10-CL; VL3-L6-VL4-L7-VH4-L8-VH3-L9-CL-L10-CH1; VH3-L6-VH4-L7-VL4-L8-VL3-L9-CL-L10-CH1; VL3-L6-VL4-L7-VH4-L8-VH3-L9-CH1-Fc; VH3-L6-VH4-L7-VL4-L8-VL3- L9-CH1-Fc; VL3-L6-VL4-L7-VH4-L8-VH3-L9-CL-Fc; VH3-L6-VH4-L7-VL4-L8-VL3-L9-CL-Fc; VL3-L6-VL4-L7-VH4-L8-VH3-L9-CH1-L10-CL-Fc; VH3-L6-VH4-L7-VL4-L8-VL3-L9-CH1-L10-CL-Fc; VL3-L6-VL4-L7-VH4-L8-VH3-L9-CL-L10-CH1-Fc; or VH3-L6-VH4-L7-VL4-L8-VL3-L9-CL-L10-CH1-Fc. In some aspects, the first polypeptide has a structure represented by VL1-L1-VL2-L2-VH2-L3-VH1-L4-CH1-L5-CL, and the second polypeptide has a structure represented by VL3-VL4-VH4-VH3; VH3-VH4-VL4-VL3; VL3-VL4-VH4-VH3-Fc; VH3-VH4-VL4-VL3-Fc; VL3-VL4-VH4-VH3-CH1; VH3-VH4-VL4-VL3-CH1; VL3-VL4-VH4-VH3-CL; VH3-VH4-VL4-VL3-CL; VL3-VL4-VH4-VH3-CH1-CL; VH3-VH4-VL4-VL3-CH1-CL; VL3-VL4-VH4-VH3-CL-CH1; VH3-VH4-VL4-VL3-CL-CH1; VL3-VL4-VH4-VH3-CH1-Fc; VH3-VH4-VL4-VL3-CH1-Fc; VL3-VL4-VH4-VH3-CL-Fc; VH3-VH4-VL4-VL3-CL-Fc; VL3-VL4-VH4-VH3-CH1-CL-Fc; VH3-VH4-VL4-VL3-CH1-CL-Fc; VL3-VL4-VH4-VH3-CL-CH1-Fc; VH3-VH4-VL4-VL3-CL-CH1-Fc; VL3-L6-VL4-L7-VH4-L8-VH3; VH3-L6-VH4-L7-VL4-L8-VL3; VL3-L6-VL4-L7-VH4-L8-VH3-Fc; VH3-L6-VH4-L7-VL4-L8-VL3-Fc; VL3-L6-VL4-L7-VH4-L8-VH3-L9-Fc; VH3-L6-VH4-L7-VL4-L8-VL3-L9-Fc; VL3-L6-VL4-L7-VH4-L8-VH3-L9-CH1; VH3-L6-VH4-L7-VL4-L8-VL3-L9-CH1; VL3-L6- VL4-L7-VH4-L8-VH3-L9-CL; VH3-L6-VH4-L7-VL4-L8-VL3-L9-CL; VL3-L6-VL4-L7-VH4-L8-VH3-L9-CH1-L10-CL; VH3-L6-VH4-L7-VL4-L8-VL3-L9-CH1-L10-CL; VL3-L6-VL4-L7-VH4-L8-VH3-L9-CL-L10-CH1; VH3-L6-VH4-L7-VL4-L8-VL3-L9-CL-L10-CH1; VL3-L6-VL4-L7-VH4-L8-VH3-L9-CH1-Fc; VH3-L6-VH4-L7-VL4-L8-VL3- L9-CH1-Fc; VL3-L6-VL4-L7-VH4-L8-VH3-L9-CL-Fc; VH3-L6-VH4-L7-VL4-L8-VL3-L9-CL-Fc; VL3-L6-VL4-L7-VH4-L8-VH3-L9-CH1-L10-CL-Fc; VH3-L6-VH4-L7-VL4-L8-VL3-L9-CH1-L10-CL-Fc; VL3-L6-VL4-L7-VH4-L8-VH3-L9-CL-L10-CH1-Fc; or VH3-L6-VH4-L7-VL4-L8-VL3-L9-CL-L10-CH1-Fc. In some aspects, the first polypeptide has a structure represented by VH1-L1-VH2-L2-VL2-L3-VL1-L4-CH1-L5-CL, and the second polypeptide has a structure represented by VL3-VL4-VH4-VH3; VH3-VH4-VL4-VL3; VL3-VL4-VH4-VH3-Fc; VH3-VH4-VL4-VL3-Fc; VL3-VL4-VH4-VH3-CH1; VH3-VH4-VL4-VL3-CH1; VL3-VL4-VH4-VH3-CL; VH3-VH4-VL4-VL3-CL; VL3-VL4-VH4-VH3-CH1-CL; VH3-VH4-VL4-VL3-CH1-CL; VL3-VL4-VH4-VH3-CL-CH1; VH3-VH4-VL4-VL3-CL-CH1; VL3-VL4-VH4-VH3-CH1-Fc; VH3-VH4-VL4-VL3-CH1-Fc; VL3-VL4-VH4-VH3-CL-Fc; VH3-VH4-VL4-VL3-CL-Fc; VL3-VL4-VH4-VH3-CH1-CL-Fc; VH3-VH4-VL4-VL3-CH1-CL-Fc; VL3-VL4-VH4-VH3-CL-CH1-Fc; VH3-VH4-VL4-VL3-CL-CH1-Fc; VL3-L6-VL4-L7-VH4-L8-VH3; VH3-L6-VH4-L7-VL4-L8-VL3; VL3-L6-VL4-L7-VH4-L8-VH3-Fc; VH3-L6-VH4-L7-VL4-L8-VL3-Fc; VL3-L6-VL4-L7-VH4-L8-VH3-L9-Fc; VH3-L6-VH4-L7-VL4-L8-VL3-L9-Fc; VL3-L6-VL4-L7-VH4-L8-VH3-L9-CH1; VH3-L6-VH4-L7-VL4-L8-VL3-L9-CH1; VL3-L6- VL4-L7-VH4-L8-VH3-L9-CL; VH3-L6-VH4-L7-VL4-L8-VL3-L9-CL; VL3-L6-VL4-L7-VH4-L8-VH3-L9-CH1-L10-CL; VH3-L6-VH4-L7-VL4-L8-VL3-L9-CH1-L10-CL; VL3-L6-VL4-L7-VH4-L8-VH3-L9-CL-L10-CH1; VH3-L6-VH4-L7-VL4-L8-VL3-L9-CL-L10-CH1; VL3-L6-VL4-L7-VH4-L8-VH3-L9-CH1-Fc; VH3-L6-VH4-L7-VL4-L8-VL3- L9-CH1-Fc; VL3-L6-VL4-L7-VH4-L8-VH3-L9-CL-Fc; VH3-L6-VH4-L7-VL4-L8-VL3-L9-CL-Fc; VL3-L6-VL4-L7-VH4-L8-VH3-L9-CH1-L10-CL-Fc; VH3-L6-VH4-L7-VL4-L8-VL3-L9-CH1-L10-CL-Fc; VL3-L6-VL4-L7-VH4-L8-VH3-L9-CL-L10-CH1-Fc; or VH3-L6-VH4-L7-VL4-L8-VL3-L9-CL-L10-CH1-Fc. In some aspects, the first polypeptide has a structure represented by VL1-L1-VL2-L2-VH2-L3-VH1-L4-CL-L5-CH1, and the second polypeptide has a structure represented by VL3-VL4-VH4-VH3; VH3-VH4-VL4-VL3; VL3-VL4-VH4-VH3-Fc; VH3-VH4-VL4-VL3-Fc; VL3-VL4-VH4-VH3-CH1; VH3-VH4-VL4-VL3-CH1; VL3-VL4-VH4-VH3-CL; VH3-VH4-VL4-VL3-CL; VL3-VL4-VH4-VH3-CH1-CL; VH3-VH4-VL4-VL3-CH1-CL; VL3-VL4-VH4-VH3-CL-CH1; VH3-VH4-VL4-VL3-CL-CH1; VL3-VL4-VH4-VH3-CH1-Fc; VH3-VH4-VL4-VL3-CH1-Fc; VL3-VL4-VH4-VH3-CL-Fc; VH3-VH4-VL4-VL3-CL-Fc; VL3-VL4-VH4-VH3-CH1-CL-Fc; VH3-VH4-VL4-VL3-CH1-CL-Fc; VL3-VL4-VH4-VH3-CL-CH1-Fc; VH3-VH4-VL4-VL3-CL-CH1-Fc; VL3-L6-VL4-L7-VH4-L8-VH3; VH3-L6-VH4-L7-VL4-L8-VL3; VL3-L6-VL4-L7-VH4-L8-VH3-Fc; VH3-L6-VH4-L7-VL4-L8-VL3-Fc; VL3-L6-VL4-L7-VH4-L8-VH3-L9-Fc; VH3-L6-VH4-L7-VL4-L8-VL3-L9-Fc; VL3-L6-VL4-L7-VH4-L8-VH3-L9-CH1; VH3-L6-VH4-L7-VL4-L8-VL3-L9-CH1; VL3-L6- VL4-L7-VH4-L8-VH3-L9-CL; VH3-L6-VH4-L7-VL4-L8-VL3-L9-CL; VL3-L6-VL4-L7-VH4-L8-VH3-L9-CH1-L10-CL; VH3-L6-VH4-L7-VL4-L8-VL3-L9-CH1-L10-CL; VL3-L6-VL4-L7-VH4-L8-VH3-L9-CL-L10-CH1; VH3-L6-VH4-L7-VL4-L8-VL3-L9-CL-L10-CH1; VL3-L6-VL4-L7-VH4-L8-VH3-L9-CH1-Fc; VH3-L6-VH4-L7-VL4-L8-VL3- L9-CH1-Fc; VL3-L6-VL4-L7-VH4-L8-VH3-L9-CL-Fc; VH3-L6-VH4-L7-VL4-L8-VL3-L9-CL-Fc; VL3-L6-VL4-L7-VH4-L8-VH3-L9-CH1-L10-CL-Fc; VH3-L6-VH4-L7-VL4-L8-VL3-L9-CH1-L10-CL-Fc; VL3-L6-VL4-L7-VH4-L8-VH3-L9-CL-L10-CH1-Fc; or VH3-L6-VH4-L7-VL4-L8-VL3-L9-CL-L10-CH1-Fc. In some aspects, the first polypeptide has a structure represented by VH1-L1-VH2-L2-VL2-L3-VL1-L4-CL-L5-CH1, and the second polypeptide has a structure represented by VL3-VL4-VH4-VH3; VH3-VH4-VL4-VL3; VL3-VL4-VH4-VH3-Fc; VH3-VH4-VL4-VL3-Fc; VL3-VL4-VH4-VH3-CH1; VH3-VH4-VL4-VL3-CH1; VL3-VL4-VH4-VH3-CL; VH3-VH4-VL4-VL3-CL; VL3-VL4-VH4-VH3-CH1-CL; VH3-VH4-VL4-VL3-CH1-CL; VL3-VL4-VH4-VH3-CL-CH1; VH3-VH4-VL4-VL3-CL-CH1; VL3-VL4-VH4-VH3-CH1-Fc; VH3-VH4-VL4-VL3-CH1-Fc; VL3-VL4-VH4-VH3-CL-Fc; VH3-VH4-VL4-VL3-CL-Fc; VL3-VL4-VH4-VH3-CH1-CL-Fc; VH3-VH4-VL4-VL3-CH1-CL-Fc; VL3-VL4-VH4-VH3-CL-CH1-Fc; VH3-VH4-VL4-VL3-CL-CH1-Fc; VL3-L6-VL4-L7-VH4-L8-VH3; VH3-L6-VH4-L7-VL4-L8-VL3; VL3-L6-VL4-L7-VH4-L8-VH3-Fc; VH3-L6-VH4-L7-VL4-L8-VL3-Fc; VL3-L6-VL4-L7-VH4-L8-VH3-L9-Fc; VH3-L6-VH4-L7-VL4-L8-VL3-L9-Fc; VL3-L6-VL4-L7-VH4-L8-VH3-L9-CH1; VH3-L6-VH4-L7-VL4-L8-VL3-L9-CH1; VL3-L6- VL4-L7-VH4-L8-VH3-L9-CL; VH3-L6-VH4-L7-VL4-L8-VL3-L9-CL; VL3-L6-VL4-L7-VH4-L8-VH3-L9-CH1-L10-CL; VH3-L6-VH4-L7-VL4-L8-VL3-L9-CH1-L10-CL; VL3-L6-VL4-L7-VH4-L8-VH3-L9-CL-L10-CH1; VH3-L6-VH4-L7-VL4-L8-VL3-L9-CL-L10-CH1; VL3-L6-VL4-L7-VH4-L8-VH3-L9-CH1-Fc; VH3-L6-VH4-L7-VL4-L8-VL3- L9-CH1-Fc; VL3-L6-VL4-L7-VH4-L8-VH3-L9-CL-Fc; VH3-L6-VH4-L7-VL4-L8-VL3-L9-CL-Fc; VL3-L6-VL4-L7-VH4-L8-VH3-L9-CH1-L10-CL-Fc; VH3-L6-VH4-L7-VL4-L8-VL3-L9-CH1-L10-CL-Fc; VL3-L6-VL4-L7-VH4-L8-VH3-L9-CL-L10-CH1-Fc; or VH3-L6-VH4-L7-VL4-L8-VL3-L9-CL-L10-CH1-Fe. In some aspects, the first polypeptide has a structure represented by VL1-L1-VL2-L2-VH2-L3-VH1-L4-CH1-Fc, and the second polypeptide has a structure represented by VL3-VL4-VH4-VH3; VH3-VH4-VL4-VL3; VL3-VL4-VH4-VH3-Fc; VH3-VH4-VL4-VL3-Fc; VL3-VL4-VH4-VH3-CH1; VH3-VH4-VL4-VL3-CH1; VL3-VL4-VH4-VH3-CL; VH3-VH4-VL4-VL3-CL; VL3-VL4-VH4-VH3-CH1-CL; VH3-VH4-VL4-VL3-CH1-CL; VL3-VL4-VH4-VH3-CL-CH1; VH3-VH4-VL4-VL3-CL-CH1; VL3-VL4-VH4-VH3-CH1-Fc; VH3-VH4-VL4-VL3-CH1-Fc; VL3-VL4-VH4-VH3-CL-Fc; VH3-VH4-VL4-VL3-CL-Fc; VL3-VL4-VH4-VH3-CH1-CL-Fc; VH3-VH4-VL4-VL3-CH1-CL-Fc; VL3-VL4-VH4-VH3-CL-CH1-Fc; VH3-VH4-VL4-VL3-CL-CH1-Fc; VL3-L6-VL4-L7-VH4-L8-VH3; VH3-L6-VH4-L7-VL4-L8-VL3; VL3-L6-VL4-L7-VH4-L8-VH3-Fc; VH3-L6-VH4-L7-VL4-L8-VL3-Fc; VL3-L6-VL4-L7-VH4-L8-VH3-L9-Fc; VH3-L6-VH4-L7-VL4-L8-VL3-L9-Fc; VL3-L6-VL4-L7-VH4-L8-VH3-L9-CH1; VH3-L6-VH4-L7-VL4-L8-VL3-L9-CH1; VL3-L6- VL4-L7-VH4-L8-VH3-L9-CL; VH3-L6-VH4-L7-VL4-L8-VL3-L9-CL; VL3-L6-VL4-L7-VH4-L8-VH3-L9-CH1-L10-CL; VH3-L6-VH4-L7-VL4-L8-VL3-L9-CH1-L10-CL; VL3-L6-VL4-L7-VH4-L8-VH3-L9-CL-L10-CH1; VH3-L6-VH4-L7-VL4-L8-VL3-L9-CL-L10-CH1; VL3-L6-VL4-L7-VH4-L8-VH3-L9-CH1-Fc; VH3-L6-VH4-L7-VL4-L8-VL3- L9-CH1-Fc; VL3-L6-VL4-L7-VH4-L8-VH3-L9-CL-Fc; VH3-L6-VH4-L7-VL4-L8-VL3-L9-CL-Fc; VL3-L6-VL4-L7-VH4-L8-VH3-L9-CH1-L10-CL-Fc; VH3-L6-VH4-L7-VL4-L8-VL3-L9-CH1-L10-CL-Fc; VL3-L6-VL4-L7-VH4-L8-VH3-L9-CL-L10-CH1-Fc; or VH3-L6-VH4-L7-VL4-L8-VL3-L9-CL-L10-CH1-Fc. In some aspects, the first polypeptide has a structure represented by VH1-L1-VH2-L2-VL2-L3-VL1-L4-CH1-Fc, and the second polypeptide has a structure represented by VL3-VL4-VH4-VH3; VH3-VH4-VL4-VL3; VL3-VL4-VH4-VH3-Fc; VH3-VH4-VL4-VL3-Fc; VL3-VL4-VH4-VH3-CH1; VH3-VH4-VL4-VL3-CH1; VL3-VL4-VH4-VH3-CL; VH3-VH4-VL4-VL3-CL; VL3-VL4-VH4-VH3-CH1-CL; VH3-VH4-VL4-VL3-CH1-CL; VL3-VL4-VH4-VH3-CL-CH1; VH3-VH4-VL4-VL3-CL-CH1; VL3-VL4-VH4-VH3-CH1-Fc; VH3-VH4-VL4-VL3-CH1-Fc; VL3-VL4-VH4-VH3-CL-Fc; VH3-VH4-VL4-VL3-CL-Fc; VL3-VL4-VH4-VH3-CH1-CL-Fc; VH3-VH4-VL4-VL3-CH1-CL-Fc; VL3-VL4-VH4-VH3-CL-CH1-Fc; VH3-VH4-VL4-VL3-CL-CH1-Fc; VL3-L6-VL4-L7-VH4-L8-VH3; VH3-L6-VH4-L7-VL4-L8-VL3; VL3-L6-VL4-L7-VH4-L8-VH3-Fc; VH3-L6-VH4-L7-VL4-L8-VL3-Fc; VL3-L6-VL4-L7-VH4-L8-VH3-L9-Fc; VH3-L6-VH4-L7-VL4-L8-VL3-L9-Fc; VL3-L6-VL4-L7-VH4-L8-VH3-L9-CH1; VH3-L6-VH4-L7-VL4-L8-VL3-L9-CH1; VL3-L6- VL4-L7-VH4-L8-VH3-L9-CL; VH3-L6-VH4-L7-VL4-L8-VL3-L9-CL; VL3-L6-VL4-L7-VH4-L8-VH3-L9-CH1-L10-CL; VH3-L6-VH4-L7-VL4-L8-VL3-L9-CH1-L10-CL; VL3-L6-VL4-L7-VH4-L8-VH3-L9-CL-L10-CH1; VH3-L6-VH4-L7-VL4-L8-VL3-L9-CL-L10-CH1; VL3-L6-VL4-L7-VH4-L8-VH3-L9-CH1-Fc; VH3-L6-VH4-L7-VL4-L8-VL3- L9-CH1-Fc; VL3-L6-VL4-L7-VH4-L8-VH3-L9-CL-Fc; VH3-L6-VH4-L7-VL4-L8-VL3-L9-CL-Fc; VL3-L6-VL4-L7-VH4-L8-VH3-L9-CH1-L10-CL-Fc; VH3-L6-VH4-L7-VL4-L8-VL3-L9-CH1-L10-CL-Fc; VL3-L6-VL4-L7-VH4-L8-VH3-L9-CL-L10-CH1-Fc; or VH3-L6-VH4-L7-VL4-L8-VL3-L9-CL-L10-CH1-Fc. In some aspects, the first polypeptide has a structure represented by VL1-L1-VL2-L2-VH2-L3-VH1-L4-CL-Fc, and the second polypeptide has a structure represented by VL3-VL4-VH4-VH3; VH3-VH4-VL4-VL3; VL3-VL4-VH4-VH3-Fc; VH3-VH4-VL4-VL3-Fc; VL3-VL4-VH4-VH3-CH1; VH3-VH4-VL4-VL3-CH1; VL3-VL4-VH4-VH3-CL; VH3-VH4-VL4-VL3-CL; VL3-VL4-VH4-VH3-CH1-CL; VH3-VH4-VL4-VL3-CH1-CL; VL3-VL4-VH4-VH3-CL-CH1; VH3-VH4-VL4-VL3-CL-CH1; VL3-VL4-VH4-VH3-CH1-Fc; VH3-VH4-VL4-VL3-CH1-Fc; VL3-VL4-VH4-VH3-CL-Fc; VH3-VH4-VL4-VL3-CL-Fc; VL3-VL4-VH4-VH3-CH1-CL-Fc; VH3-VH4-VL4-VL3-CH1-CL-Fc; VL3-VL4-VH4-VH3-CL-CH1-Fc; VH3-VH4-VL4-VL3-CL-CH1-Fc; VL3-L6-VL4-L7-VH4-L8-VH3; VH3-L6-VH4-L7-VL4-L8-VL3; VL3-L6-VL4-L7-VH4-L8-VH3-Fc; VH3-L6-VH4-L7-VL4-L8-VL3-Fc; VL3-L6-VL4-L7-VH4-L8-VH3-L9-Fc; VH3-L6-VH4-L7-VL4-L8-VL3-L9-Fc; VL3-L6-VL4-L7-VH4-L8-VH3-L9-CH1; VH3-L6-VH4-L7-VL4-L8-VL3-L9-CH1; VL3-L6-VL4- L7-VH4-L8-VH3-L9-CL; VH3-L6-VH4-L7-VL4-L8-VL3-L9-CL; VL3-L6-VL4-L7-VH4-L8-VH3-L9-CH1-L10-CL; VH3-L6-VH4-L7-VL4-L8-VL3-L9-CH1-L10-CL; VL3-L6-VL4-L7-VH4-L8-VH3-L9-CL-L10-CH1; VH3-L6-VH4-L7-VL4-L8-VL3-L9-CL-L10-CH1; VL3-L6-VL4-L7-VH4-L8-VH3-L9-CH1-Fc; VH3-L6-VH4-L7-VL4-L8-VL3- L9-CH1-Fc; VL3-L6-VL4-L7-VH4-L8-VH3-L9-CL-Fc; VH3-L6-VH4-L7-VL4-L8-VL3-L9-CL-Fc; VL3-L6-VL4-L7-VH4-L8-VH3-L9-CH1-L10-CL-Fc; VH3-L6-VH4-L7-VL4-L8-VL3-L9-CH1-L10-CL-Fc; VL3-L6-VL4-L7-VH4-L8-VH3-L9-CL-L10-CH1-Fc; or VH3-L6-VH4-L7-VL4-L8-VL3-L9-CL-L10-CH1-Fc. In some aspects, the first polypeptide has a structure represented by VH1-L1-VH2-L2-VL2-L3-VL1-L4-CL-Fc, and the second polypeptide has a structure represented by VL3-VL4-VH4-VH3; VH3-VH4-VL4-VL3; VL3-VL4-VH4-VH3-Fc; VH3-VH4-VL4-VL3-Fc; VL3-VL4-VH4-VH3-CH1; VH3-VH4-VL4-VL3-CH1; VL3-VL4-VH4-VH3-CL; VH3-VH4-VL4-VL3-CL; VL3-VL4-VH4-VH3-CH1-CL; VH3-VH4-VL4-VL3-CH1-CL; VL3-VL4-VH4-VH3-CL-CH1; VH3-VH4-VL4-VL3-CL-CH1; VL3-VL4-VH4-VH3-CH1-Fc; VH3-VH4-VL4-VL3-CH1-Fc; VL3-VL4-VH4-VH3-CL-Fc; VH3-VH4-VL4-VL3-CL-Fc; VL3-VL4-VH4-VH3-CH1-CL-Fc; VH3-VH4-VL4-VL3-CH1-CL-Fc; VL3-VL4-VH4-VH3-CL-CH1-Fc; VH3-VH4-VL4-VL3-CL-CH1-Fc; VL3-L6-VL4-L7-VH4-L8-VH3; VH3-L6-VH4-L7-VL4-L8-VL3; VL3-L6-VL4-L7-VH4-L8-VH3-Fc; VH3-L6-VH4-L7-VL4-L8-VL3-Fc; VL3-L6-VL4-L7-VH4-L8-VH3-L9-Fc; VH3-L6-VH4-L7-VL4-L8-VL3-L9-Fc; VL3-L6-VL4-L7-VH4-L8-VH3-L9-CH1; VH3-L6-VH4-L7-VL4-L8-VL3-L9-CH1; VL3-L6-VL4- L7-VH4-L8-VH3-L9-CL; VH3-L6-VH4-L7-VL4-L8-VL3-L9-CL; VL3-L6-VL4-L7-VH4-L8-VH3-L9-CH1-L10-CL; VH3-L6-VH4-L7-VL4-L8-VL3-L9-CH1-L10-CL; VL3-L6-VL4-L7-VH4-L8-VH3-L9-CL-L10-CH1; VH3-L6-VH4-L7-VL4-L8-VL3-L9-CL-L10-CH1; VL3-L6-VL4-L7-VH4-L8-VH3-L9-CH1-Fc; VH3-L6-VH4-L7-VL4-L8-VL3- L9-CH1-Fc; VL3-L6-VL4-L7-VH4-L8-VH3-L9-CL-Fc; VH3-L6-VH4-L7-VL4-L8-VL3-L9-CL-Fc; VL3-L6-VL4-L7-VH4-L8-VH3-L9-CH1-L10-CL-Fc; VH3-L6-VH4-L7-VL4-L8-VL3-L9-CH1-L10-CL-Fc; VL3-L6-VL4-L7-VH4-L8-VH3-L9-CL-L10-CH1-Fc; or VH3-L6-VH4-L7-VL4-L8-VL3-L9-CL-L10-CH1-Fc. In some aspects, the first polypeptide has a structure represented by VL1-L1-VL2-L2-VH2-L3-VH1-L4-CH1-L5-CL-Fc, and the second polypeptide has a structure represented by VL3-VL4-VH4-VH3; VH3-VH4-VL4-VL3; VL3-VL4-VH4-VH3-Fc; VH3-VH4-VL4-VL3-Fc; VL3-VL4-VH4-VH3-CH1; VH3-VH4-VL4-VL3-CH1; VL3-VL4-VH4-VH3-CL; VH3-VH4-VL4-VL3-CL; VL3-VL4-VH4-VH3-CH1-CL; VH3-VH4-VL4-VL3-CH1-CL; VL3-VL4-VH4-VH3-CL-CH1; VH3-VH4-VL4-VL3-CL-CH1; VL3-VL4-VH4-VH3-CH1-Fc; VH3-VH4-VL4-VL3-CH1-Fc; VL3-VL4-VH4-VH3-CL-Fc; VH3-VH4-VL4-VL3-CL-Fc; VL3-VL4-VH4-VH3-CH1-CL-Fc; VH3-VH4-VL4-VL3-CH1-CL-Fc; VL3-VL4-VH4-VH3-CL-CH1-Fc; VH3-VH4-VL4-VL3-CL-CH1-Fc; VL3-L6-VL4-L7-VH4-L8-VH3; VH3-L6-VH4-L7-VL4-L8-VL3; VL3-L6-VL4-L7-VH4-L8-VH3-Fc; VH3-L6-VH4-L7-VL4-L8-VL3-Fc; VL3-L6-VL4-L7-VH4-L8-VH3-L9-Fc; VH3-L6-VH4-L7-VL4-L8-VL3-L9-Fc; VL3-L6-VL4-L7-VH4-L8-VH3-L9-CH1; VH3-L6-VH4-L7-VL4-L8-VL3-L9-CH1; VL3-L6-VL4-L7-VH4-L8-VH3-L9-CL; VH3-L6-VH4-L7-VL4-L8-VL3-L9-CL; VL3-L6-VL4-L7-VH4-L8-VH3- L9-CH1-L10-CL; VH3-L6-VH4-L7-VL4-L8-VL3-L9-CH1-L10-CL; VL3-L6-VL4-L7-VH4-L8-VH3-L9-CL-L10-CH1; VH3-L6-VH4-L7-VL4-L8-VL3-L9-CL-L10-CH1; VL3-L6-VL4-L7-VH4-L8-VH3-L9-CH1-Fc; VH3-L6-VH4-L7-VL4-L8-VL3-L9-CH1-Fc; VL3-L6-VL4-L7-VH4-L8-VH3-L9-CL-Fc; VH3-L6-VH4-L7-VL4-L8-VL3-L9-CL-Fc; VL3-L6-VL4-L7-VH4-L8-VH3-L9-CH1-L10-CL-Fc; VH3-L6-VH4-L7-VL4-L8-VL3-L9-CH1-L10-CL-Fc; VL3-L6-VL4-L7-VH4-L8-VH3-L9-CL-L10-CH1-Fc; or VH3-L6-VH4-L7-VL4-L8-VL3-L9-CL-L10-CH1-Fc. In some aspects, the first polypeptide has a structure represented by VH1-L1-VH2-L2-VL2-L3-VL1-L4-CH1-L5-CL-Fc, and the second polypeptide has a structure represented by VL3-VL4-VH4-VH3; VH3-VH4-VL4-VL3; VL3-VL4-VH4-VH3-Fc; VH3-VH4-VL4-VL3-Fc; VL3-VL4-VH4-VH3-CH1; VH3-VH4-VL4-VL3-CH1; VL3-VL4-VH4-VH3-CL; VH3-VH4-VL4-VL3-CL; VL3-VL4-VH4-VH3-CH1-CL; VH3-VH4-VL4-VL3-CH1-CL; VL3-VL4-VH4-VH3-CL-CH1; VH3-VH4-VL4-VL3-CL-CH1; VL3-VL4-VH4-VH3-CH1-Fc; VH3-VH4-VL4-VL3-CH1-Fc; VL3-VL4-VH4-VH3-CL-Fc; VH3-VH4-VL4-VL3-CL-Fc; VL3-VL4-VH4-VH3-CH1-CL-Fc; VH3-VH4-VL4-VL3-CH1-CL-Fc; VL3-VL4-VH4-VH3-CL-CH1-Fc; VH3-VH4-VL4-VL3-CL-CH1-Fc; VL3-L6-VL4-L7-VH4-L8-VH3; VH3-L6-VH4-L7-VL4-L8-VL3; VL3-L6-VL4-L7-VH4-L8-VH3-Fc; VH3-L6-VH4-L7-VL4-L8-VL3-Fc; VL3-L6-VL4-L7-VH4-L8-VH3-L9-Fc; VH3-L6-VH4-L7-VL4-L8-VL3-L9-Fc; VL3-L6-VL4-L7-VH4-L8-VH3-L9-CH1; VH3-L6-VH4-L7-VL4-L8-VL3-L9-CH1; VL3-L6-VL4-L7-VH4-L8-VH3-L9-CL; VH3-L6-VH4-L7-VL4-L8-VL3-L9-CL; VL3-L6-VL4-L7-VH4-L8-VH3- L9-CH1-L10-CL; VH3-L6-VH4-L7-VL4-L8-VL3-L9-CH1-L10-CL; VL3-L6-VL4-L7-VH4-L8-VH3-L9-CL-L10-CH1; VH3-L6-VH4-L7-VL4-L8-VL3-L9-CL-L10-CH1; VL3-L6-VL4-L7-VH4-L8-VH3-L9-CH1-Fc; VH3-L6-VH4-L7-VL4-L8-VL3-L9-CH1-Fc; VL3-L6-VL4-L7-VH4-L8-VH3-L9-CL-Fc; VH3-L6-VH4-L7-VL4-L8-VL3-L9-CL-Fc; VL3-L6-VL4-L7-VH4-L8-VH3-L9-CH1-L10-CL-Fc; VH3-L6-VH4-L7-VL4-L8-VL3-L9-CH1-L10-CL-Fc; VL3-L6-VL4-L7-VH4-L8-VH3-L9-CL-L10-CH1-Fc; or VH3-L6-VH4-L7-VL4-L8-VL3-L9-CL-L10-CH1-Fc. In some aspects, the first polypeptide has a structure represented by VL1-L1-VL2-L2-VH2-L3-VH1-L4-CL-L5-CH1-Fc, and the second polypeptide has a structure represented by VL3-VL4-VH4-VH3; VH3-VH4-VL4-VL3; VL3-VL4-VH4-VH3-Fc; VH3-VH4-VL4-VL3-Fc; VL3-VL4-VH4-VH3-CH1; VH3-VH4-VL4-VL3-CH1; VL3-VL4-VH4-VH3-CL; VH3-VH4-VL4-VL3-CL; VL3-VL4-VH4-VH3-CH1-CL; VH3-VH4-VL4-VL3-CH1-CL; VL3-VL4-VH4-VH3-CL-CH1; VH3-VH4-VL4-VL3-CL-CH1; VL3-VL4-VH4-VH3-CH1-Fc; VH3-VH4-VL4-VL3-CH1-Fc; VL3-VL4-VH4-VH3-CL-Fc; VH3-VH4-VL4-VL3-CL-Fc; VL3-VL4-VH4-VH3-CH1-CL-Fc; VH3-VH4-VL4-VL3-CH1-CL-Fc; VL3-VL4-VH4-VH3-CL-CH1-Fc; VH3-VH4-VL4-VL3-CL-CH1-Fc; VL3-L6-VL4-L7-VH4-L8-VH3; VH3-L6-VH4-L7-VL4-L8-VL3; VL3-L6-VL4-L7-VH4-L8-VH3-Fc; VH3-L6-VH4-L7-VL4-L8-VL3-Fc; VL3-L6-VL4-L7-VH4-L8-VH3-L9-Fc; VH3-L6-VH4-L7-VL4-L8-VL3-L9-Fc; VL3-L6-VL4-L7-VH4-L8-VH3-L9-CH1; VH3-L6-VH4-L7-VL4-L8-VL3-L9-CH1; VL3-L6-VL4-L7-VH4-L8-VH3-L9-CL; VH3-L6-VH4-L7-VL4-L8-VL3-L9-CL; VL3-L6-VL4-L7-VH4-L8-VH3- L9-CH1-L10-CL; VH3-L6-VH4-L7-VL4-L8-VL3-L9-CH1-L10-CL; VL3-L6-VL4-L7-VH4-L8-VH3-L9-CL-L10-CH1; VH3-L6-VH4-L7-VL4-L8-VL3-L9-CL-L10-CH1; VL3-L6-VL4-L7-VH4-L8-VH3-L9-CH1-Fc; VH3-L6-VH4-L7-VL4-L8-VL3-L9-CH1-Fc; VL3-L6-VL4-L7-VH4-L8-VH3-L9-CL-Fc; VH3-L6-VH4-L7-VL4-L8-VL3-L9-CL-Fc; VL3-L6-VL4-L7-VH4-L8-VH3-L9-CH1-L10-CL-Fc; VH3-L6-VH4-L7-VL4-L8-VL3-L9-CH1-L10-CL-Fc; VL3-L6-VL4-L7-VH4-L8-VH3-L9-CL-L10-CH1-Fc; or VH3-L6-VH4-L7-VL4-L8-VL3-L9-CL-L10-CH1-Fc. In some aspects, the first polypeptide has a structure represented by VH1-L1-VH2-L2-VL2-L3-VL1-L4-CL-L5-CH1-Fc, and the second polypeptide has a structure represented by VL3-VL4-VH4-VH3; VH3-VH4-VL4-VL3; VL3-VL4-VH4-VH3-Fc; VH3-VH4-VL4-VL3-Fc; VL3-VL4-VH4-VH3-CH1; VH3-VH4-VL4-VL3-CH1; VL3-VL4-VH4-VH3-CL; VH3-VH4-VL4-VL3-CL; VL3-VL4-VH4-VH3-CH1-CL; VH3-VH4-VL4-VL3-CH1-CL; VL3-VL4-VH4-VH3-CL-CH1; VH3-VH4-VL4-VL3-CL-CH1; VL3-VL4-VH4-VH3-CH1-Fc; VH3-VH4-VL4-VL3-CH1-Fc; VL3-VL4-VH4-VH3-CL-Fc; VH3-VH4-VL4-VL3-CL-Fc; VL3-VL4-VH4-VH3-CH1-CL-Fc; VH3-VH4-VL4-VL3-CH1-CL-Fc; VL3-VL4-VH4-VH3-CL-CH1-Fc; VH3-VH4-VL4-VL3-CL-CH1-Fc; VL3-L6-VL4-L7-VH4-L8-VH3; VH3-L6-VH4-L7-VL4-L8-VL3; VL3-L6-VL4-L7-VH4-L8-VH3-Fc; VH3-L6-VH4-L7-VL4-L8-VL3-Fc; VL3-L6-VL4-L7-VH4-L8-VH3-L9-Fc; VH3-L6-VH4-L7-VL4-L8-VL3-L9-Fc; VL3-L6-VL4-L7-VH4-L8-VH3-L9-CH1; VH3-L6-VH4-L7-VL4-L8-VL3-L9-CH1; VL3-L6-VL4-L7-VH4-L8-VH3-L9-CL; VH3-L6-VH4-L7-VL4-L8-VL3-L9-CL; VL3-L6-VL4-L7-VH4-L8-VH3- L9-CH1-L10-CL; VH3-L6-VH4-L7-VL4-L8-VL3-L9-CH1-L10-CL; VL3-L6-VL4-L7-VH4-L8-VH3-L9-CL-L10-CH1; VH3-L6-VH4-L7-VL4-L8-VL3-L9-CL-L10-CH1; VL3-L6-VL4-L7-VH4-L8-VH3-L9-CH1-Fc; VH3-L6-VH4-L7-VL4-L8-VL3-L9-CH1-Fc; VL3-L6-VL4-L7-VH4-L8-VH3-L9-CL-Fc; VH3-L6-VH4-L7-VL4-L8-VL3-L9-CL-Fc; VL3-L6-VL4-L7-VH4-L8-VH3-L9-CH1-L10-CL-Fc; VH3-L6-VH4-L7-VL4-L8-VL3-L9-CH1-L10-CL-Fc; VL3-L6-VL4-L7-VH4-L8-VH3-L9-CL-L10-CH1-Fc; or VH3-L6-VH4-L7-VL4-L8-VL3-L9-CL-L10-CH1-Fc.

[0212] In some aspects, an antigen binding polypeptide or antigen binding polypeptide complex of the invention does not specifically bind to an antigen associated with human immunodeficiency virus (HIV) (e.g., an HIV envelope protein) and/or an antigen associated with severe acute respiratory syndrome (SARS).

[0213] In other aspects, the invention is directed to an antigen binding polypeptide complex comprising a first polypeptide and a second polypeptide; wherein the first polypeptide has a structure represented by VL1-VL2-VH2-VH1; VH1-VH2-VL2-VL1; VL1-L1-VL2-L2-VH2-L3-VH1; or VH1-L1-VH2-L2-VL2-L3-VL1; wherein the second polypeptide has a structure represented by VL3-VL4-VH4-VH3; VH3-VH4-VL4-VL3; VL3-L4-VL4-L5-VH4-L6-VH3; or VH3-L4-VH4-L5-VL4-L6-VL3; wherein VL1 is a first immunoglobulin light chain variable region that specifically binds to A2AR, APRIL, ATPDase, BAFF, BAFFR, BCMA, BlyS, BTK, BTLA, B7DC, B7H1, B7H2, B7H3, B7H4, B7H5, B7H6, B7H7, B7RP1, B7-4, C3, C5, CCL2, CCL3, CCL4, CCL5, CCL7, CCL8, CCL11, CCL15, CCL17, CCL19, CCL20, CCL21, CCL25 CCR3, CCR4, CD3, CD16A, CD19, CD20, CD24, CD27, CD28, CD30, CD38, CD39, CD40, CD40L, CD47, CD52, CD70, CD80, CD86, CD123, CD133, CD137, CD137L, CD160, CD272, CEACAM5, CLEC9, CLEC91, CRTH2, CSF-1, CSF-2, CSF-3, CXCL1, CXCL2, CXCL4, CXCL12, CXCL13, CXCR3, cMet, CTLA4, DLL3, DLL4, DNGR-1, E-cadherin, EGFR, ENTPD1, EpCAM, FCER1, FCER1A, FCER2, FGFR, FLAP, FOLH1, Gi24, GITR, GITRL, GPR5, GP100, GPRC5D, HER2, HER3, ICOSL, ICOS, HHLA2, HMGB1, HVEM, IDO, IFNa, IgE, IGF1R, IL2Rbeta, IL1, ILIA, IL1B, IL1F10, IL2, IL4, IL4Ra, IL5, IL5R, IL6, IL7, IL7Ra, IL8, IL9, IL9R, IL10, rhIL1O, IL12, IL13, IL13Ra1, IL13Ra2, IL15, IL17, IL17Rb, IL18, IL22, IL23, IL25, IL7, IL33, IL35, ITGB4, ITK, KIR, LAG3, LAMP1, leptin, LPFS2, MHC class II, MUC-1, MUC-16, NCR3LG1, NKG2D, NKp46, NTPDase-1, OX40, OX40L, PD-1, PD-L1, PD-L2, PROM1, S152, SIRPalpha, SISP1, SLC, SPG64, ST2, STEAP1, STEAP2, Syk kinase, STEAP1, TROP2, TACI, TDO, TGFBETA, T14, TIGIT, TIM3, TLR, TLR2, TLR4, TLR5, TLR9, TMEF1, TNFa, TNFRSF7, Tp55, TREM1, TSLP, TSLPR, TWEAK, VEGF, VISTA, Vstm3, or WUCAM; VL2 is a second immunoglobulin light chain variable region that specifically binds to A2AR, APRIL, ATPDase, BAFF, BAFFR, BCMA, BlyS, BTK, BTLA, B7DC, B7H1, B7H2, B7H3, B7H4, B7H5, B7H6, B7H7, B7RP1, B7-4, C3, C5, CCL2, CCL3, CCL4, CCL5, CCL7, CCL8, CCL11, CCL15, CCL17, CCL19, CCL20, CCL21, CCL25 CCR3, CCR4, CD3, CD16A, CD19, CD20, CD24, CD27, CD28, CD30, CD38, CD39, CD40, CD40L, CD47, CD52, CD70, CD80, CD86, CD123, CD133, CD137, CD137L, CD160, CD272, CEACAM5, CLEC9, CLEC91, CRTH2, CSF-1, CSF-2, CSF-3, CXCL1, CXCL2, CXCL4, CXCL12, CXCL13, CXCR3, cMet, CTLA4, DLL3, DLL4, DNGR-1, E-cadherin, EGFR, ENTPD1, EpCAM, FCER1, FCER1A, FCER2, FGFR, FLAP, FOLH1, Gi24, GITR, GITRL, GPR5, GP100, GPRC5D, HER2, HER3, ICOSL, ICOS, HHLA2, HMGB1, HVEM, IDO, IFNa, IgE, IGF1R, IL2Rbeta, IL1, ILIA, IL1B, IL1F10, IL2, IL4, IL4Ra, IL5, IL5R, IL6, IL7, IL7Ra, IL8, IL9, IL9R, IL10, rhIL1O, IL12, IL13, IL13Ra1, IL13Ra2, IL15, IL17, IL17Rb, IL18, IL22, IL23, IL25, IL7, IL33, IL35, ITGB4, ITK, KIR, LAG3, LAMP1, leptin, LPFS2, MHC class II, MUC-1, MUC-16, NCR3LG1, NKG2D, NKp46, NTPDase-1, OX40, OX40L, PD-1, PD-L1, PD-L2, PROM1, S152, SIRPalpha, SISP1, SLC, SPG64, ST2, STEAP1, STEAP2, Syk kinase, STEAP1, TROP2, TACI, TDO, TGFBETA, T14, TIGIT, TIM3, TLR, TLR2, TLR4, TLR5, TLR9, TMEF1, TNFa, TNFRSF7, Tp55, TREM1, TSLP, TSLPR, TWEAK, VEGF, VISTA, Vstm3, or WUCAM; VL3 is a third immunoglobulin light chain variable region that specifically binds to A2AR, APRIL, ATPDase, BAFF, BAFFR, BCMA, BlyS, BTK, BTLA, B7DC, B7H1, B7H2, B7H3, B7H4, B7H5, B7H6, B7H7, B7RP1, B7-4, C3, C5, CCL2, CCL3, CCL4, CCL5, CCL7, CCL8, CCL11, CCL15, CCL17, CCL19, CCL20, CCL21, CCL25 CCR3, CCR4, CD3, CD16A, CD19, CD20, CD24, CD27, CD28, CD30, CD38, CD39, CD40, CD40L, CD47, CD52, CD70, CD80, CD86, CD123, CD133, CD137, CD137L, CD160, CD272, CEACAM5, CLEC9, CLEC91, CRTH2, CSF-1, CSF-2, CSF-3, CXCL1, CXCL2, CXCL4, CXCL12, CXCL13, CXCR3, cMet, CTLA4, DLL3, DLL4, DNGR-1, E-cadherin, EGFR, ENTPD1, EpCAM, FCER1, FCER1A, FCER2, FGFR, FLAP, FOLH1, Gi24, GITR, GITRL, GPR5, GP100, GPRC5D, HER2, HER3, ICOSL, ICOS, HHLA2, HMGB1, HVEM, IDO, IFNa, IgE, IGF1R, IL2Rbeta, IL1, ILIA, IL1B, IL1F10, IL2, IL4, IL4Ra, IL5, IL5R, IL6, IL7, IL7Ra, IL8, IL9, IL9R, IL10, rhIL1O, IL12, IL13, IL13Ra1, IL13Ra2, IL15, IL17, IL17Rb, IL18, IL22, IL23, IL25, IL7, IL33, IL35, ITGB4, ITK, KIR, LAG3, LAMP1, leptin, LPFS2, MHC class II, MUC-1, MUC-16, NCR3LG1, NKG2D, NKp46, NTPDase-1, OX40, OX40L, PD-1, PD-L1, PD-L2, PROM1, S152, SIRPalpha, SISP1, SLC, SPG64, ST2, STEAP1, STEAP2, Syk kinase, STEAP1, TROP2, TACI, TDO, TGFBETA, T14, TIGIT, TIM3, TLR, TLR2, TLR4, TLR5, TLR9, TMEF1, TNFa, TNFRSF7, Tp55, TREM1, TSLP, TSLPR, TWEAK, VEGF, VISTA, Vstm3, or WUCAM; VL4 is a fourth immunoglobulin light chain variable region that specifically binds to A2AR, APRIL, ATPDase, BAFF, BAFFR, BCMA, BlyS, BTK, BTLA, B7DC, B7H1, B7H2, B7H3, B7H4, B7H5, B7H6, B7H7, B7RP1, B7-4, C3, C5, CCL2, CCL3, CCL4, CCL5, CCL7, CCL8, CCL11, CCL15, CCL17, CCL19, CCL20, CCL21, CCL25 CCR3, CCR4, CD3, CD16A, CD19, CD20, CD24, CD27, CD28, CD30, CD38, CD39, CD40, CD40L, CD47, CD52, CD70, CD80, CD86, CD123, CD133, CD137, CD137L, CD160, CD272, CEACAM5, CLEC9, CLEC91, CRTH2, CSF-1, CSF-2, CSF-3, CXCL1, CXCL2, CXCL4, CXCL12, CXCL13, CXCR3, cMet, CTLA4, DLL3, DLL4, DNGR-1, E-cadherin, EGFR, ENTPD1, EpCAM, FCER1, FCER1A, FCER2, FGFR, FLAP, FOLH1, Gi24, GITR, GITRL, GPR5, GP100, GPRC5D, HER2, HER3, ICOSL, ICOS, HHLA2, HMGB1, HVEM, IDO, IFNa, IgE, IGF1R, IL2Rbeta, IL1, ILIA, IL1B, IL1F10, IL2, IL4, IL4Ra, IL5, IL5R, IL6, IL7, IL7Ra, IL8, IL9, IL9R, IL10, rhIL1O, IL12, IL13, IL13Ra1, IL13Ra2, IL15, IL17, IL17Rb, IL18, IL22, IL23, IL25, IL7, IL33, IL35, ITGB4, ITK, KIR, LAG3, LAMP1, leptin, LPFS2, MHC class II, MUC-1, MUC-16, NCR3LG1, NKG2D, NKp46, NTPDase-1, OX40, OX40L, PD-1, PD-L1, PD-L2, PROM1, S152, SIRPalpha, SISP1, SLC, SPG64, ST2, STEAP1, STEAP2, Syk kinase, STEAP1, TROP2, TACI, TDO, TGFBETA, T14, TIGIT, TIM3, TLR, TLR2, TLR4, TLR5, TLR9, TMEF1, TNFa, TNFRSF7, Tp55, TREM1, TSLP, TSLPR, TWEAK, VEGF, VISTA, Vstm3, or WUCAM; VH1 is a first immunoglobulin heavy chain variable region that specifically binds to A2AR, APRIL, ATPDase, BAFF, BAFFR, BCMA, BlyS, BTK, BTLA, B7DC, B7H1, B7H2, B7H3, B7H4, B7H5, B7H6, B7H7, B7RP1, B7-4, C3, C5, CCL2, CCL3, CCL4, CCL5, CCL7, CCL8, CCL11, CCL15, CCL17, CCL19, CCL20, CCL21, CCL25 CCR3, CCR4, CD3, CD16A, CD19, CD20, CD24, CD27, CD28, CD30, CD38, CD39, CD40, CD40L, CD47, CD52, CD70, CD80, CD86, CD123, CD133, CD137, CD137L, CD160, CD272, CEACAM5, CLEC9, CLEC91, CRTH2, CSF-1, CSF-2, CSF-3, CXCL1, CXCL2, CXCL4, CXCL12, CXCL13, CXCR3, cMet, CTLA4, DLL3, DLL4, DNGR-1, E-cadherin, EGFR, ENTPD1, EpCAM, FCER1, FCER1A, FCER2, FGFR, FLAP, FOLH1, Gi24, GITR, GITRL, GPR5, GP100, GPRC5D, HER2, HER3, ICOSL, ICOS, HHLA2, HMGB1, HVEM, IDO, IFNa, IgE, IGF1R, IL2Rbeta, IL1, ILIA, IL1B, IL1F10, IL2, IL4, IL4Ra, IL5, IL5R, IL6, IL7, IL7Ra, IL8, IL9, IL9R, IL10, rhIL1O, IL12, IL13, IL13Ra1, IL13Ra2, IL15, IL17, IL17Rb, IL18, IL22, IL23, IL25, IL7, IL33, IL35, ITGB4, ITK, KIR, LAG3, LAMP1, leptin, LPFS2, MHC class II, MUC-1, MUC-16, NCR3LG1, NKG2D, NKp46, NTPDase-1, OX40, OX40L, PD-1, PD-L1, PD-L2, PROM1, S152, SIRPalpha, SISP1, SLC, SPG64, ST2, STEAP1, STEAP2, Syk kinase, STEAP1, TROP2, TACI, TDO, TGFBETA, T14, TIGIT, TIM3, TLR, TLR2, TLR4, TLR5, TLR9, TMEF1, TNFa, TNFRSF7, Tp55, TREM1, TSLP, TSLPR, TWEAK, VEGF, VISTA, Vstm3, or WUCAM; VH2 is a second immunoglobulin heavy chain variable region that specifically binds to A2AR, APRIL, ATPDase, BAFF, BAFFR, BCMA, BlyS, BTK, BTLA, B7DC, B7H1, B7H2, B7H3, B7H4, B7H5, B7H6, B7H7, B7RP1, B7-4, C3, C5, CCL2, CCL3, CCL4, CCL5, CCL7, CCL8, CCL11, CCL15, CCL17, CCL19, CCL20, CCL21, CCL25 CCR3, CCR4, CD3, CD16A, CD19, CD20, CD24, CD27, CD28, CD30, CD38, CD39, CD40, CD40L, CD47, CD52, CD70, CD80, CD86, CD123, CD133, CD137, CD137L, CD160, CD272, CEACAM5, CLEC9, CLEC91, CRTH2, CSF-1, CSF-2, CSF-3, CXCL1, CXCL2, CXCL4, CXCL12, CXCL13, CXCR3, cMet, CTLA4, DLL3, DLL4, DNGR-1, E-cadherin, EGFR, ENTPD1, EpCAM, FCER1, FCER1A, FCER2, FGFR, FLAP, FOLH1, Gi24, GITR, GITRL, GPR5, GP100, GPRC5D, HER2, HER3, ICOSL, ICOS, HHLA2, HMGB1, HVEM, IDO, IFNa, IgE, IGF1R, IL2Rbeta, IL1, ILIA, IL1B, IL1F10, IL2, IL4, IL4Ra, IL5, IL5R, IL6, IL7, IL7Ra, IL8, IL9, IL9R, IL10, rhIL1O, IL12, IL13, IL13Ra1, IL13Ra2, IL15, IL17, IL17Rb, IL18, IL22, IL23, IL25, IL7, IL33, IL35, ITGB4, ITK, KIR, LAG3, LAMP1, leptin, LPFS2, MHC class II, MUC-1, MUC-16, NCR3LG1, NKG2D, NKp46, NTPDase-1, OX40, OX40L, PD-1, PD-L1, PD-L2, PROM1, S152, SIRPalpha, SISP1, SLC, SPG64, ST2, STEAP1, STEAP2, Syk kinase, STEAP1, TROP2, TACI, TDO, TGFBETA, T14, TIGIT, TIM3, TLR, TLR2, TLR4, TLR5, TLR9, TMEF1, TNFa, TNFRSF7, Tp55, TREM1, TSLP, TSLPR, TWEAK, VEGF, VISTA, Vstm3, or WUCAM; VH3 is a third immunoglobulin heavy chain variable region that specifically binds to A2AR, APRIL, ATPDase, BAFF, BAFFR, BCMA, BlyS, BTK, BTLA, B7DC, B7H1, B7H2, B7H3, B7H4, B7H5, B7H6, B7H7, B7RP1, B7-4, C3, C5, CCL2, CCL3, CCL4, CCL5, CCL7, CCL8, CCL11, CCL15, CCL17, CCL19, CCL20, CCL21, CCL25 CCR3, CCR4, CD3, CD16A, CD19, CD20, CD24, CD27, CD28, CD30, CD38, CD39, CD40, CD40L, CD47, CD52, CD70, CD80, CD86, CD123, CD133, CD137, CD137L, CD160, CD272, CEACAM5, CLEC9, CLEC91, CRTH2, CSF-1, CSF-2, CSF-3, CXCL1, CXCL2, CXCL4, CXCL12, CXCL13, CXCR3, cMet, CTLA4, DLL3, DLL4, DNGR-1, E-cadherin, EGFR, ENTPD1, EpCAM, FCER1, FCER1A, FCER2, FGFR, FLAP, FOLH1, Gi24, GITR, GITRL, GPR5, GP100, GPRC5D, HER2, HER3, ICOSL, ICOS, HHLA2, HMGB1, HVEM, IDO, IFNa, IgE, IGF1R, IL2Rbeta, IL1, ILIA, IL1B, IL1F10, IL2, IL4, IL4Ra, IL5, IL5R, IL6, IL7, IL7Ra, IL8, IL9, IL9R, IL10, rhIL1O, IL12, IL13, IL13Ra1, IL13Ra2, IL15, IL17, IL17Rb, IL18, IL22, IL23, IL25, IL7, IL33, IL35, ITGB4, ITK, KIR, LAG3, LAMP1, leptin, LPFS2, MHC class II, MUC-1, MUC-16, NCR3LG1, NKG2D, NKp46, NTPDase-1, OX40, OX40L, PD-1, PD-L1, PD-L2, PROM1, S152, SIRPalpha, SISP1, SLC, SPG64, ST2, STEAP1, STEAP2, Syk kinase, STEAP1, TROP2, TACI, TDO, TGFBETA, T14, TIGIT, TIM3, TLR, TLR2, TLR4, TLR5, TLR9, TMEF1, TNFa, TNFRSF7, Tp55, TREM1, TSLP, TSLPR, TWEAK, VEGF, VISTA, Vstm3, or WUCAM; VH4 is a fourth immunoglobulin heavy chain variable region that specifically binds to A2AR, APRIL, ATPDase, BAFF, BAFFR, BCMA, BlyS, BTK, BTLA, B7DC, B7H1, B7H2, B7H3, B7H4, B7H5, B7H6, B7H7, B7RP1, B7-4, C3, C5, CCL2, CCL3, CCL4, CCL5, CCL7, CCL8, CCL11, CCL15, CCL17, CCL19, CCL20, CCL21, CCL25 CCR3, CCR4, CD3, CD16A, CD19, CD20, CD24, CD27, CD28, CD30, CD38, CD39, CD40, CD40L, CD47, CD52, CD70, CD80, CD86, CD123, CD133, CD137, CD137L, CD160, CD272, CEACAM5, CLEC9, CLEC91, CRTH2, CSF-1, CSF-2, CSF-3, CXCL1, CXCL2, CXCL4, CXCL12, CXCL13, CXCR3, cMet, CTLA4, DLL3, DLL4, DNGR-1, E-cadherin, EGFR, ENTPD1, EpCAM, FCER1, FCER1A, FCER2, FGFR, FLAP, FOLH1, Gi24, GITR, GITRL, GPR5, GP100, GPRC5D, HER2, HER3, ICOSL, ICOS, HHLA2, HMGB1, HVEM, IDO, IFNa, IgE, IGF1R, IL2Rbeta, IL1, ILIA, IL1B, IL1F10, IL2, IL4, IL4Ra, IL5, IL5R, IL6, IL7, IL7Ra, IL8, IL9, IL9R, IL10, rhIL1O, IL12, IL13, IL13Ra1, IL13Ra2, IL15, IL17, IL17Rb, IL18, IL22, IL23, IL25, IL7, IL33, IL35, ITGB4, ITK, KIR, LAG3, LAMP1, leptin, LPFS2, MHC class II, MUC-1, MUC-16, NCR3LG1, NKG2D, NKp46, NTPDase-1, OX40, OX40L, PD-1, PD-L1, PD-L2, PROM1, S152, SIRPalpha, SISP1, SLC, SPG64, ST2, STEAP1, STEAP2, Syk kinase, STEAP1, TROP2, TACI, TDO, TGFBETA, T14, TIGIT, TIM3, TLR, TLR2, TLR4, TLR5, TLR9, TMEF1, TNFa, TNFRSF7, Tp55, TREM1, TSLP, TSLPR, TWEAK, VEGF, VISTA, Vstm3, or WUCAM; and L1, L2, L3, L4, L5 and L6 are amino acid linkers. In some aspects, the first polypeptide has a structure represented by VL1-VL2-VH2-VH1 and the second polypeptide has a structure represented by VL3-VL4-VH4-VH3. In some aspects, the first polypeptide has a structure represented by VL1-VL2-VH2-VH1 and the second polypeptide has a structure represented by VH3-VH4-VL4-VL3. In some aspects, the first polypeptide has a structure represented by VL1-VL2-VH2-VH1 and the second polypeptide has a structure represented by VL3-L4-VL4-L5-VH4-L6-VH3. In some aspects, the first polypeptide has a structure represented by VL1-VL2-VH2-VH1 and the second polypeptide has a structure represented by VH3-L4-VH4-L5-VL4-L6-VL3. In some aspects, the first polypeptide has a structure represented by VH1-VH2-VL2-VL1 and the second polypeptide has a structure represented by VL3-VL4-VH4-VH3. In some aspects, the first polypeptide has a structure represented by VH1-VH2-VL2-VL1 and the second polypeptide has a structure represented by VH3-VH4-VL4-VL3. In some aspects, the first polypeptide has a structure represented by VH1-VH2-VL2-VL1 and the second polypeptide has a structure represented by VL3-L4-VL4-L5-VH4-L6-VH3. In some aspects, the first polypeptide has a structure represented by VH1-VH2-VL2-VL1 and the second polypeptide has a structure represented by VH3-L4-VH4-L5-VL4-L6-VL3. In some aspects, the first polypeptide has a structure represented by VL1-L1-VL2-L2-VH2-L3-VH1 and the second polypeptide has a structure represented by VL3-VL4-VH4-VH3. In some aspects, the first polypeptide has a structure represented by VL1-L1-VL2-L2-VH2-L3-VH1 and the second polypeptide has a structure represented by VH3-VH4-VL4-VL3. In some aspects, the first polypeptide has a structure represented by VL1-L1-VL2-L2-VH2-L3-VH1 and the second polypeptide has a structure represented by VL3-L4-VL4-L5-VH4-L6-VH3. In some aspects, the first polypeptide has a structure represented by VL1-L1-VL2-L2-VH2-L3-VH1 and the second polypeptide has a structure represented by VH3-L4-VH4-L5-VL4-L6-VL3. In some aspects, the first polypeptide has a structure represented by VH1-L1-VH2-L2-VL2-L3-VL1 and the second polypeptide has a structure represented by VL3-VL4-VH4-VH3. In some aspects, the first polypeptide has a structure represented by VH1-L1-VH2-L2-VL2-L3-VL1 and the second polypeptide has a structure represented by VH3-VH4-VL4-VL3. In some aspects, the first polypeptide has a structure represented by VH1-L1-VH2-L2-VL2-L3-VL1 and the second polypeptide has a structure represented by VL3-L4-VL4-L5-VH4-L6-VH3. In some aspects, the first polypeptide has a structure represented by VH1-L1-VH2-L2-VL2-L3-VL1 and the second polypeptide has a structure represented by VH3-L4-VH4-L5-VL4-L6-VL3. In some aspects, the VL1, VL2, VL3, VL4, VH1, VH2, VH3 and/or VH4 specifically binds to A2AR, APRIL, ATPDase, BAFF, BAFFR, BCMA, BlyS, BTK, BTLA, B7DC, B7H1, B7H2, B7H3, B7H4, B7H5, B7H6, B7H7, B7RP1, B7-4, C3, C5, CCL2, CCL3, CCL4, CCL5, CCL7, CCL8, CCL11, CCL15, CCL17, CCL19, CCL20, CCL21, CCL25 CCR3, CCR4, CD3, CD16A, CD19, CD20, CD24, CD27, CD28, CD30, CD38, CD39, CD40, CD40L, CD47, CD52, CD70, CD80, CD86, CD123, CD133, CD137, CD137L, CD160, CD272, CEACAM5, CLEC9, CLEC91, CRTH2, CSF-1, CSF-2, CSF-3, CXCL1, CXCL2, CXCL4, CXCL12, CXCL13, CXCR3, cMet, CTLA4, DLL3, DLL4, DNGR-1, E-cadherin, EGFR, ENTPD1, EpCAM, FCER1, FCER1A, FCER2, FGFR, FLAP, FOLH1, Gi24, GITR, GITRL, GPR5, GP100, GPRC5D, HER2, HER3, ICOSL, ICOS, HHLA2, HMGB1, HVEM, IDO, IFNa, IgE, IGF1R, IL2Rbeta, IL1, ILIA, IL1B, IL1F10, IL2, IL4, IL4Ra, IL5, IL5R, IL6, IL7, IL7Ra, IL8, IL9, IL9R, IL10, rhIL1O, IL12, IL13, IL13Ra1, IL13Ra2, IL15, IL17, IL17Rb, IL18, IL22, IL23, IL25, IL7, IL33, IL35, ITGB4, ITK, KIR, LAG3, LAMP1, leptin, LPFS2, MHC class II, MUC-1, MUC-16, NCR3LG1, NKG2D, NKp46, NTPDase-1, OX40, OX40L, PD-1, PD-L1, PD-L2, PROM1, S152, SIRPalpha, SISP1, SLC, SPG64, ST2, STEAP1, STEAP2, Syk kinase, STEAP1, TROP2, TACI, TDO, TGFBETA, T14, TIGIT, TIM3, TLR, TLR2, TLR4, TLR5, TLR9, TMEF1, TNFa, TNFRSF7, Tp55, TREM1, TSLP, TSLPR, TWEAK, VEGF, VISTA, Vstm3, or WUCAM. Any and all disclosure herein in relation to targets for antigen binding polypeptides of the invention is generally applicable, and applies equally and without reservation to each and every antigen binding polypeptide and antigen binding polypeptide complex described herein. For the avoidance of doubt, the VL1, VL2, VL3, VL4, VH1, VH2, VH3 and/or VH4 of each and every antigen binding polypeptide and antigen binding polypeptide complex described herein may independently bind to any one of said particularly preferred targets.

[0214] In other aspects, the invention is directed to an antigen binding polypeptide complex comprising a first polypeptide and a second polypeptide; wherein the first polypeptide has a structure represented by VL1-VL2-VH2-VH1-Fc; VH1-VH2-VL2-VL1-Fc; VL1-L1-VL2-L2-VH2-L3-VH1-Fc; VH1-L1-VH2-L2-VL2-L3-VL1-Fc; VL1-L1-VL2-L2-VH2-L3-VH1-L4-Fc; or VH1-L1-VH2-L2-VL2-L3-VL1-L4-Fc; wherein the second polypeptide has a structure represented by VL3-VL4-VH4-VH3-Fe; VH3-VH4-VL4-VL3-Fc; VL3-L5-VL4-L6-VH4-L7-VH3-Fc; VH3-L5-VH4-L6-VL4-L7-VL3-Fc; VL3-L5-VL4-L6-VH4-L7-VH3-L8-Fc; or VH3-L5-VH4-L6-VL4-L7-VL3-L8-Fc; wherein VL1 is a first immunoglobulin light chain variable region that specifically binds to A2AR, APRIL, ATPDase, BAFF, BAFFR, BCMA, BlyS, BTK, BTLA, B7DC, B7H1, B7H2, B7H3, B7H4, B7H5, B7H6, B7H7, B7RP1, B7-4, C3, C5, CCL2, CCL3, CCL4, CCL5, CCL7, CCL8, CCL11, CCL15, CCL17, CCL19, CCL20, CCL21, CCL25 CCR3, CCR4, CD3, CD16A, CD19, CD20, CD24, CD27, CD28, CD30, CD38, CD39, CD40, CD40L, CD47, CD52, CD70, CD80, CD86, CD123, CD133, CD137, CD137L, CD160, CD272, CEACAM5, CLEC9, CLEC91, CRTH2, CSF-1, CSF-2, CSF-3, CXCL1, CXCL2, CXCL4, CXCL12, CXCL13, CXCR3, cMet, CTLA4, DLL3, DLL4, DNGR-1, E-cadherin, EGFR, ENTPD1, EpCAM, FCER1, FCER1A, FCER2, FGFR, FLAP, FOLH1, Gi24, GITR, GITRL, GPR5, GP100, GPRC5D, HER2, HER3, ICOSL, ICOS, HHLA2, HMGB1, HVEM, IDO, IFNa, IgE, IGF1R, IL2Rbeta, IL1, ILIA, IL1B, IL1F10, IL2, IL4, IL4Ra, IL5, IL5R, IL6, IL7, IL7Ra, IL8, IL9, IL9R, IL10, rhIL1O, IL12, IL13, IL13Ra1, IL13Ra2, IL15, IL17, IL17Rb, IL18, IL22, IL23, IL25, IL7, IL33, IL35, ITGB4, ITK, KIR, LAG3, LAMP1, leptin, LPFS2, MHC class II, MUC-1, MUC-16, NCR3LG1, NKG2D, NKp46, NTPDase-1, OX40, OX40L, PD-1, PD-L1, PD-L2, PROM1, S152, SIRPalpha, SISP1, SLC, SPG64, ST2, STEAP1, STEAP2, Syk kinase, STEAP1, TROP2, TACI, TDO, TGFBETA, T14, TIGIT, TIM3, TLR, TLR2, TLR4, TLR5, TLR9, TMEF1, TNFa, TNFRSF7, Tp55, TREM1, TSLP, TSLPR, TWEAK, VEGF, VISTA, Vstm3, or WUCAM; VL2 is a second immunoglobulin light chain variable region that specifically binds to A2AR, APRIL, ATPDase, BAFF, BAFFR, BCMA, BlyS, BTK, BTLA, B7DC, B7H1, B7H2, B7H3, B7H4, B7H5, B7H6, B7H7, B7RP1, B7-4, C3, C5, CCL2, CCL3, CCL4, CCL5, CCL7, CCL8, CCL11, CCL15, CCL17, CCL19, CCL20, CCL21, CCL25 CCR3, CCR4, CD3, CD16A, CD19, CD20, CD24, CD27, CD28, CD30, CD38, CD39, CD40, CD40L, CD47, CD52, CD70, CD80, CD86, CD123, CD133, CD137, CD137L, CD160, CD272, CEACAM5, CLEC9, CLEC91, CRTH2, CSF-1, CSF-2, CSF-3, CXCL1, CXCL2, CXCL4, CXCL12, CXCL13, CXCR3, cMet, CTLA4, DLL3, DLL4, DNGR-1, E-cadherin, EGFR, ENTPD1, EpCAM, FCER1, FCER1A, FCER2, FGFR, FLAP, FOLH1, Gi24, GITR, GITRL, GPR5, GP100, GPRC5D, HER2, HER3, ICOSL, ICOS, HHLA2, HMGB1, HVEM, IDO, IFNa, IgE, IGF1R, IL2Rbeta, IL1, ILIA, IL1B, IL1F10, IL2, IL4, IL4Ra, IL5, IL5R, IL6, IL7, IL7Ra, IL8, IL9, IL9R, IL10, rhIL1O, IL12, IL13, IL13Ra1, IL13Ra2, IL15, IL17, IL17Rb, IL18, IL22, IL23, IL25, IL7, IL33, IL35, ITGB4, ITK, KIR, LAG3, LAMP1, leptin, LPFS2, MHC class II, MUC-1, MUC-16, NCR3LG1, NKG2D, NKp46, NTPDase-1, OX40, OX40L, PD-1, PD-L1, PD-L2, PROM1, S152, SIRPalpha, SISP1, SLC, SPG64, ST2, STEAP1, STEAP2, Syk kinase, STEAP1, TROP2, TACI, TDO, TGFBETA, T14, TIGIT, TIM3, TLR, TLR2, TLR4, TLR5, TLR9, TMEF1, TNFa, TNFRSF7, Tp55, TREM1, TSLP, TSLPR, TWEAK, VEGF, VISTA, Vstm3, or WUCAM; VL3 is a third immunoglobulin light chain variable region that specifically binds to A2AR, APRIL, ATPDase, BAFF, BAFFR, BCMA, BlyS, BTK, BTLA, B7DC, B7H1, B7H2, B7H3, B7H4, B7H5, B7H6, B7H7, B7RP1, B7-4, C3, C5, CCL2, CCL3, CCL4, CCL5, CCL7, CCL8, CCL11, CCL15, CCL17, CCL19, CCL20, CCL21, CCL25 CCR3, CCR4, CD3, CD16A, CD19, CD20, CD24, CD27, CD28, CD30, CD38, CD39, CD40, CD40L, CD47, CD52, CD70, CD80, CD86, CD123, CD133, CD137, CD137L, CD160, CD272, CEACAM5, CLEC9, CLEC91, CRTH2, CSF-1, CSF-2, CSF-3, CXCL1, CXCL2, CXCL4, CXCL12, CXCL13, CXCR3, cMet, CTLA4, DLL3, DLL4, DNGR-1, E-cadherin, EGFR, ENTPD1, EpCAM, FCER1, FCER1A, FCER2, FGFR, FLAP, FOLH1, Gi24, GITR, GITRL, GPR5, GP100, GPRC5D, HER2, HER3, ICOSL, ICOS, HHLA2, HMGB1, HVEM, IDO, IFNa, IgE, IGF1R, IL2Rbeta, IL1, ILIA, IL1B, IL1F10, IL2, IL4, IL4Ra, IL5, IL5R, IL6, IL7, IL7Ra, IL8, IL9, IL9R, IL10, rhIL1O, IL12, IL13, IL13Ra1, IL13Ra2, IL15, IL17, IL17Rb, IL18, IL22, IL23, IL25, IL7, IL33, IL35, ITGB4, ITK, KIR, LAG3, LAMP1, leptin, LPFS2, MHC class II, MUC-1, MUC-16, NCR3LG1, NKG2D, NKp46, NTPDase-1, OX40, OX40L, PD-1, PD-L1, PD-L2, PROM1, S152, SIRPalpha, SISP1, SLC, SPG64, ST2, STEAP1, STEAP2, Syk kinase, STEAP1, TROP2, TACI, TDO, TGFBETA, T14, TIGIT, TIM3, TLR, TLR2, TLR4, TLR5, TLR9, TMEF1, TNFa, TNFRSF7, Tp55, TREM1, TSLP, TSLPR, TWEAK, VEGF, VISTA, Vstm3, or WUCAM; VL4 is a fourth immunoglobulin light chain variable region that specifically binds to A2AR, APRIL, ATPDase, BAFF, BAFFR, BCMA, BlyS, BTK, BTLA, B7DC, B7H1, B7H2, B7H3, B7H4, B7H5, B7H6, B7H7, B7RP1, B7-4, C3, C5, CCL2, CCL3, CCL4, CCL5, CCL7, CCL8, CCL11, CCL15, CCL17, CCL19, CCL20, CCL21, CCL25 CCR3, CCR4, CD3, CD16A, CD19, CD20, CD24, CD27, CD28, CD30, CD38, CD39, CD40, CD40L, CD47, CD52, CD70, CD80, CD86, CD123, CD133, CD137, CD137L, CD160, CD272, CEACAM5, CLEC9, CLEC91, CRTH2, CSF-1, CSF-2, CSF-3, CXCL1, CXCL2, CXCL4, CXCL12, CXCL13, CXCR3, cMet, CTLA4, DLL3, DLL4, DNGR-1, E-cadherin, EGFR, ENTPD1, EpCAM, FCER1, FCER1A, FCER2, FGFR, FLAP, FOLH1, Gi24, GITR, GITRL, GPR5, GP100, GPRC5D, HER2, HER3, ICOSL, ICOS, HHLA2, HMGB1, HVEM, IDO, IFNa, IgE, IGF1R, IL2Rbeta, IL1, ILIA, IL1B, IL1F10, IL2, IL4, IL4Ra, IL5, IL5R, IL6, IL7, IL7Ra, IL8, IL9, IL9R, IL10, rhIL1O, IL12, IL13, IL13Ra1, IL13Ra2, IL15, IL17, IL17Rb, IL18, IL22, IL23, IL25, IL7, IL33, IL35, ITGB4, ITK, KIR, LAG3, LAMP1, leptin, LPFS2, MHC class II, MUC-1, MUC-16, NCR3LG1, NKG2D, NKp46, NTPDase-1, OX40, OX40L, PD-1, PD-L1, PD-L2, PROM1, S152, SIRPalpha, SISP1, SLC, SPG64, ST2, STEAP1, STEAP2, Syk kinase, STEAP1, TROP2, TACI, TDO, TGFBETA, T14, TIGIT, TIM3, TLR, TLR2, TLR4, TLR5, TLR9, TMEF1, TNFa, TNFRSF7, Tp55, TREM1, TSLP, TSLPR, TWEAK, VEGF, VISTA, Vstm3, or WUCAM; VH1 is a first immunoglobulin heavy chain variable region that specifically binds to A2AR, APRIL, ATPDase, BAFF, BAFFR, BCMA, BlyS, BTK, BTLA, B7DC, B7H1, B7H2, B7H3, B7H4, B7H5, B7H6, B7H7, B7RP1, B7-4, C3, C5, CCL2, CCL3, CCL4, CCL5, CCL7, CCL8, CCL11, CCL15, CCL17, CCL19, CCL20, CCL21, CCL25 CCR3, CCR4, CD3, CD16A, CD19, CD20, CD24, CD27, CD28, CD30, CD38, CD39, CD40, CD40L, CD47, CD52, CD70, CD80, CD86, CD123, CD133, CD137, CD137L, CD160, CD272, CEACAM5, CLEC9, CLEC91, CRTH2, CSF-1, CSF-2, CSF-3, CXCL1, CXCL2, CXCL4, CXCL12, CXCL13, CXCR3, cMet, CTLA4, DLL3, DLL4, DNGR-1, E-cadherin, EGFR, ENTPD1, EpCAM, FCER1, FCER1A, FCER2, FGFR, FLAP, FOLH1, Gi24, GITR, GITRL, GPR5, GP100, GPRC5D, HER2, HER3, ICOSL, ICOS, HHLA2, HMGB1, HVEM, IDO, IFNa, IgE, IGF1R, IL2Rbeta, IL1, ILIA, IL1B, IL1F10, IL2, IL4, IL4Ra, IL5, IL5R, IL6, IL7, IL7Ra, IL8, IL9, IL9R, IL10, rhIL1O, IL12, IL13, IL13Ra1, IL13Ra2, IL15, IL17, IL17Rb, IL18, IL22, IL23, IL25, IL7, IL33, IL35, ITGB4, ITK, KIR, LAG3, LAMP1, leptin, LPFS2, MHC class II, MUC-1, MUC-16, NCR3LG1, NKG2D, NKp46, NTPDase-1, OX40, OX40L, PD-1, PD-L1, PD-L2, PROM1, S152, SIRPalpha, SISP1, SLC, SPG64, ST2, STEAP1, STEAP2, Syk kinase, STEAP1, TROP2, TACI, TDO, TGFBETA, T14, TIGIT, TIM3, TLR, TLR2, TLR4, TLR5, TLR9, TMEF1, TNFa, TNFRSF7, Tp55, TREM1, TSLP, TSLPR, TWEAK, VEGF, VISTA, Vstm3, or WUCAM; VH2 is a second immunoglobulin heavy chain variable region that specifically binds to A2AR, APRIL, ATPDase, BAFF, BAFFR, BCMA, BlyS, BTK, BTLA, B7DC, B7H1, B7H2, B7H3, B7H4, B7H5, B7H6, B7H7, B7RP1, B7-4, C3, C5, CCL2, CCL3, CCL4, CCL5, CCL7, CCL8, CCL11, CCL15, CCL17, CCL19, CCL20, CCL21, CCL25 CCR3, CCR4, CD3, CD16A, CD19, CD20, CD24, CD27, CD28, CD30, CD38, CD39, CD40, CD40L, CD47, CD52, CD70, CD80, CD86, CD123, CD133, CD137, CD137L, CD160, CD272, CEACAM5, CLEC9, CLEC91, CRTH2, CSF-1, CSF-2, CSF-3, CXCL1, CXCL2, CXCL4, CXCL12, CXCL13, CXCR3, cMet, CTLA4, DLL3, DLL4, DNGR-1, E-cadherin, EGFR, ENTPD1, EpCAM, FCER1, FCER1A, FCER2, FGFR, FLAP, FOLH1, Gi24, GITR, GITRL, GPR5, GP100, GPRC5D, HER2, HER3, ICOSL, ICOS, HHLA2, HMGB1, HVEM, IDO, IFNa, IgE, IGF1R, IL2Rbeta, IL1, ILIA, IL1B, IL1F10, IL2, IL4, IL4Ra, IL5, IL5R, IL6, IL7, IL7Ra, IL8, IL9, IL9R, IL10, rhIL1O, IL12, IL13, IL13Ra1, IL13Ra2, IL15, IL17, IL17Rb, IL18, IL22, IL23, IL25, IL7, IL33, IL35, ITGB4, ITK, KIR, LAG3, LAMP1, leptin, LPFS2, MHC class II, MUC-1, MUC-16, NCR3LG1, NKG2D, NKp46, NTPDase-1, OX40, OX40L, PD-1, PD-L1, PD-L2, PROM1, S152, SIRPalpha, SISP1, SLC, SPG64, ST2, STEAP1, STEAP2, Syk kinase, STEAP1, TROP2, TACI, TDO, TGFBETA, T14, TIGIT, TIM3, TLR, TLR2, TLR4, TLR5, TLR9, TMEF1, TNFa, TNFRSF7, Tp55, TREM1, TSLP, TSLPR, TWEAK, VEGF, VISTA, Vstm3, or WUCAM; VH3 is a third immunoglobulin heavy chain variable region that specifically binds to A2AR, APRIL, ATPDase, BAFF, BAFFR, BCMA, BlyS, BTK, BTLA, B7DC, B7H1, B7H2, B7H3, B7H4, B7H5, B7H6, B7H7, B7RP1, B7-4, C3, C5, CCL2, CCL3, CCL4, CCL5, CCL7, CCL8, CCL11, CCL15, CCL17, CCL19, CCL20, CCL21, CCL25 CCR3, CCR4, CD3, CD16A, CD19, CD20, CD24, CD27, CD28, CD30, CD38, CD39, CD40, CD40L, CD47, CD52, CD70, CD80, CD86, CD123, CD133, CD137, CD137L, CD160, CD272, CEACAM5, CLEC9, CLEC91, CRTH2, CSF-1, CSF-2, CSF-3, CXCL1, CXCL2, CXCL4, CXCL12, CXCL13, CXCR3, cMet, CTLA4, DLL3, DLL4, DNGR-1, E-cadherin, EGFR, ENTPD1, EpCAM, FCER1, FCER1A, FCER2, FGFR, FLAP, FOLH1, Gi24, GITR, GITRL, GPR5, GP100, GPRC5D, HER2, HER3, ICOSL, ICOS, HHLA2, HMGB1, HVEM, IDO, IFNa, IgE, IGF1R, IL2Rbeta, IL1, ILIA, IL1B, IL1F10, IL2, IL4, IL4Ra, IL5, IL5R, IL6, IL7, IL7Ra, IL8, IL9, IL9R, IL10, rhIL1O, IL12, IL13, IL13Ra1, IL13Ra2, IL15, IL17, IL17Rb, IL18, IL22, IL23, IL25, IL7, IL33, IL35, ITGB4, ITK, KIR, LAG3, LAMP1, leptin, LPFS2, MHC class II, MUC-1, MUC-16, NCR3LG1, NKG2D, NKp46, NTPDase-1, OX40, OX40L, PD-1, PD-L1, PD-L2, PROM1, S152, SIRPalpha, SISP1, SLC, SPG64, ST2, STEAP1, STEAP2, Syk kinase, STEAP1, TROP2, TACI, TDO, TGFBETA, T14, TIGIT, TIM3, TLR, TLR2, TLR4, TLR5, TLR9, TMEF1, TNFa, TNFRSF7, Tp55, TREM1, TSLP, TSLPR, TWEAK, VEGF, VISTA, Vstm3, or WUCAM; VH4 is a fourth immunoglobulin heavy chain variable region that specifically binds to A2AR, APRIL, ATPDase, BAFF, BAFFR, BCMA, BlyS, BTK, BTLA, B7DC, B7H1, B7H2, B7H3, B7H4, B7H5, B7H6, B7H7, B7RP1, B7-4, C3, C5, CCL2, CCL3, CCL4, CCL5, CCL7, CCL8, CCL11, CCL15, CCL17, CCL19, CCL20, CCL21, CCL25 CCR3, CCR4, CD3, CD16A, CD19, CD20, CD24, CD27, CD28, CD30, CD38, CD39, CD40, CD40L, CD47, CD52, CD70, CD80, CD86, CD123, CD133, CD137, CD137L, CD160, CD272, CEACAM5, CLEC9, CLEC91, CRTH2, CSF-1, CSF-2, CSF-3, CXCL1, CXCL2, CXCL4, CXCL12, CXCL13, CXCR3, cMet, CTLA4, DLL3, DLL4, DNGR-1, E-cadherin, EGFR, ENTPD1, EpCAM, FCER1, FCER1A, FCER2, FGFR, FLAP, FOLH1, Gi24, GITR, GITRL, GPR5, GP100, GPRC5D, HER2, HER3, ICOSL, ICOS, HHLA2, HMGB1, HVEM, IDO, IFNa, IgE, IGF1R, IL2Rbeta, IL1, ILIA, IL1B, IL1F10, IL2, IL4, IL4Ra, IL5, IL5R, IL6, IL7, IL7Ra, IL8, IL9, IL9R, IL10, rhIL1O, IL12, IL13, IL13Ra1, IL13Ra2, IL15, IL17, IL17Rb, IL18, IL22, IL23, IL25, IL7, IL33, IL35, ITGB4, ITK, KIR, LAG3, LAMP1, leptin, LPFS2, MHC class II, MUC-1, MUC-16, NCR3LG1, NKG2D, NKp46, NTPDase-1, OX40, OX40L, PD-1, PD-L1, PD-L2, PROM1, S152, SIRPalpha, SISP1, SLC, SPG64, ST2, STEAP1, STEAP2, Syk kinase, STEAP1, TROP2, TACI, TDO, TGFBETA, T14, TIGIT, TIM3, TLR, TLR2, TLR4, TLR5, TLR9, TMEF1, TNFa, TNFRSF7, Tp55, TREM1, TSLP, TSLPR, TWEAK, VEGF, VISTA, Vstm3, or WUCAM; Fc is a region comprising an immunoglobulin heavy chain constant region 2 (CH2), an immunoglobulin heavy chain constant region 3 (CH3), and optionally, an immunoglobulin hinge; and L1, L2, L3, L4, L5, L6, L7 and L8 are amino acid linkers. In some aspects, the first polypeptide has a structure represented by VL1-VL2-VH2-VH1-Fc and the second polypeptide has a structure represented by VL3-VL4-VH4-VH3-Fc. In some aspects, the first polypeptide has a structure represented by VL1-VL2-VH2-VH1-Fc and the second polypeptide has a structure represented by VH3-VH4-VL4-VL3-Fc. In some aspects, the first polypeptide has a structure represented by VL1-VL2-VH2-VH1-Fc and the second polypeptide has a structure represented by VL3-L5-VL4-L6-VH4-L7-VH3-Fc. In some aspects, the first polypeptide has a structure represented by VL1-VL2-VH2-VH1-Fc and the second polypeptide has a structure represented by VH3-L5-VH4-L6-VL4-L7-VL3-Fc. In some aspects, the first polypeptide has a structure represented by VL1-VL2-VH2-VH1-Fc and the second polypeptide has a structure represented by VL3-L5-VL4-L6-VH4-L7-VH3-L8-Fc. In some aspects, the first polypeptide has a structure represented by VL1-VL2-VH2-VH1-Fc and the second polypeptide has a structure represented by VH3-L5-VH4-L6-VL4-L7-VL3-L8-Fc. In some aspects, the first polypeptide has a structure represented by VH1-VH2-VL2-VL1-Fc and the second polypeptide has a structure represented by VL3-VL4-VH4-VH3-Fc. In some aspects, the first polypeptide has a structure represented by VH1-VH2-VL2-VL1-Fc and the second polypeptide has a structure represented by VH3-VH4-VL4-VL3-Fc. In some aspects, the first polypeptide has a structure represented by VH1-VH2-VL2-VL1-Fc and the second polypeptide has a structure represented by VL3-L5-VL4-L6-VH4-L7-VH3-Fc. In some aspects, the first polypeptide has a structure represented by VH1-VH2-VL2-VL1-Fc and the second polypeptide has a structure represented by VH3-L5-VH4-L6-VL4-L7-VL3-Fc. In some aspects, the first polypeptide has a structure represented by VH1-VH2-VL2-VL1-Fc and the second polypeptide has a structure represented by VL3-L5-VL4-L6-VH4-L7-VH3-L8-Fc. In some aspects, the first polypeptide has a structure represented by VH1-VH2-VL2-VL1-Fc and the second polypeptide has a structure represented by VH3-L5-VH4-L6-VL4-L7-VL3-L8-Fc. In some aspects, the first polypeptide has a structure represented by VL1-L1-VL2-L2-VH2-L3-VH1-Fc and the second polypeptide has a structure represented by VL3-VL4-VH4-VH3-Fc. In some aspects, the first polypeptide has a structure represented by VL1-L1-VL2-L2-VH2-L3-VH1-Fc and the second polypeptide has a structure represented by VH3-VH4-VL4-VL3-Fc. In some aspects, the first polypeptide has a structure represented by VL1-L1-VL2-L2-VH2-L3-VH1-Fc and the second polypeptide has a structure represented by VL3-L5-VL4-L6-VH4-L7-VH3-Fc. In some aspects, the first polypeptide has a structure represented by VL1-L1-VL2-L2-VH2-L3-VH1-Fc and the second polypeptide has a structure represented by VH3-L5-VH4-L6-VL4-L7-VL3-Fc. In some aspects, the first polypeptide has a structure represented by VL1-L1-VL2-L2-VH2-L3-VH1-Fc and the second polypeptide has a structure represented by VL3-L5-VL4-L6-VH4-L7-VH3-L8-Fc. In some aspects, the first polypeptide has a structure represented by VL1-L1-VL2-L2-VH2-L3-VH1-Fc and the second polypeptide has a structure represented by VH3-L5-VH4-L6-VL4-L7-VL3-L8-Fc. In some aspects, the first polypeptide has a structure represented by VH1-L1-VH2-L2-VL2-L3-VL1-Fc and the second polypeptide has a structure represented by VL3-VL4-VH4-VH3-Fc. In some aspects, the first polypeptide has a structure represented by VH1-L1-VH2-L2-VL2-L3-VL1-Fc and the second polypeptide has a structure represented by VH3-VH4-VL4-VL3-Fc. In some aspects, the first polypeptide has a structure represented by VH1-L1-VH2-L2-VL2-L3-VL1-Fc and the second polypeptide has a structure represented by VL3-L5-VL4-L6-VH4-L7-VH3-Fc. In some aspects, the first polypeptide has a structure represented by VH1-L1-VH2-L2-VL2-L3-VL1-Fc and the second polypeptide has a structure represented by VH3-L5-VH4-L6-VL4-L7-VL3-Fc. In some aspects, the first polypeptide has a structure represented by VH1-L1-VH2-L2-VL2-L3-VL1-Fc and the second polypeptide has a structure represented by VL3-L5-VL4-L6-VH4-L7-VH3-L8-Fc. In some aspects, the first polypeptide has a structure represented by VH1-L1-VH2-L2-VL2-L3-VL1-Fc and the second polypeptide has a structure represented by VH3-L5-VH4-L6-VL4-L7-VL3-L8-Fc. In some aspects, the first polypeptide has a structure represented by VL1-L1-VL2-L2-VH2-L3-VH1-L4-Fc and the second polypeptide has a structure represented by VL3-VL4-VH4-VH3-Fc. In some aspects, the first polypeptide has a structure represented by VL1-L1-VL2-L2-VH2-L3-VH1-L4-Fc and the second polypeptide has a structure represented by VH3-VH4-VL4-VL3-Fc. In some aspects, the first polypeptide has a structure represented by VL1-L1-VL2-L2-VH2-L3-VH1-L4-Fc and the second polypeptide has a structure represented by VL3-L5-VL4-L6-VH4-L7-VH3-Fc. In some aspects, the first polypeptide has a structure represented by VL1-L1-VL2-L2-VH2-L3-VH1-L4-Fc and the second polypeptide has a structure represented by VH3-L5-VH4-L6-VL4-L7-VL3-Fc. In some aspects, the first polypeptide has a structure represented by VL1-L1-VL2-L2-VH2-L3-VH1-L4-Fc and the second polypeptide has a structure represented by VL3-L5-VL4-L6-VH4-L7-VH3-L8-Fc. In some aspects, the first polypeptide has a structure represented by VL1-L1-VL2-L2-VH2-L3-VH1-L4-Fc and the second polypeptide has a structure represented by VH3-L5-VH4-L6-VL4-L7-VL3-L8-Fc. In some aspects, the first polypeptide has a structure represented by VH1-L1-VH2-L2-VL2-L3-VL1-L4-Fc and the second polypeptide has a structure represented by VL3-VL4-VH4-VH3-Fc. In some aspects, the first polypeptide has a structure represented by VH1-L1-VH2-L2-VL2-L3-VL1-L4-Fc and the second polypeptide has a structure represented by VH3-VH4-VL4-VL3-Fc. In some aspects, the first polypeptide has a structure represented by VH1-L1-VH2-L2-VL2-L3-VL1-L4-Fc and the second polypeptide has a structure represented by VL3-L5-VL4-L6-VH4-L7-VH3-Fc. In some aspects, the first polypeptide has a structure represented by VH1-L1-VH2-L2-VL2-L3-VL1-L4-Fc and the second polypeptide has a structure represented by VH3-L5-VH4-L6-VL4-L7-VL3-Fc. In some aspects, the first polypeptide has a structure represented by VH1-L1-VH2-L2-VL2-L3-VL1-L4-Fc and the second polypeptide has a structure represented by VL3-L5-VL4-L6-VH4-L7-VH3-L8-Fc. In some aspects, the first polypeptide has a structure represented by VH1-L1-VH2-L2-VL2-L3-VL1-L4-Fc and the second polypeptide has a structure represented by VH3-L5-VH4-L6-VL4-L7-VL3-L8-Fc. In some aspects, the VL1, VL2, VL3, VL4, VH1, VH2, VH3 and/or VH4 specifically binds to A2AR, APRIL, ATPDase, BAFF, BAFFR, BCMA, BlyS, BTK, BTLA, B7DC, B7H1, B7H2, B7H3, B7H4, B7H5, B7H6, B7H7, B7RP1, B7-4, C3, C5, CCL2, CCL3, CCL4, CCLS, CCL7, CCL8, CCL11, CCL15, CCL17, CCL19, CCL20, CCL21, CCL25 CCR3, CCR4, CD3, CD16A, CD19, CD20, CD24, CD27, CD28, CD30, CD38, CD39, CD40, CD40L, CD47, CD52, CD70, CD80, CD86, CD123, CD133, CD137, CD137L, CD160, CD272, CEACAM5, CLEC9, CLEC91, CRTH2, CSF-1, CSF-2, CSF-3, CXCL1, CXCL2, CXCL4, CXCL12, CXCL13, CXCR3, cMet, CTLA4, DLL3, DLL4, DNGR-1, E-cadherin, EGFR, ENTPD1, EpCAM, FCER1, FCER1A, FCER2, FGFR, FLAP, FOLH1, Gi24, GITR, GITRL, GPRS, GP100, GPRC5D, HER2, HER3, ICOSL, ICOS, HHLA2, HMGB1, HVEM, IDO, IFNa, IgE, IGF1R, IL2Rbeta, IL1, ILIA, IL1B, IL1F10, IL2, IL4, IL4Ra, IL5, IL5R, 116, IL7, IL7Ra, IL8, IL9, IL9R, IL10, rhIL1O, IL12, IL13, IL13Ra1, IL13Ra2, IL15, IL17, IL17Rb, IL18, IL22, IL23, IL25, IL7, IL33, IL35, ITGB4, ITK, KIR, LAG3, LAMP1, leptin, LPFS2, MHC class II, MUC-1, MUC-16, NCR3LG1, NKG2D, NKp46, NTPDase-1, OX40, OX40L, PD-1, PD-L1, PD-L2, PROM1, S152, SIRPalpha, SISP1, SLC, SPG64, ST2, STEAP1, STEAP2, Syk kinase, STEAP1, TROP2, TACI, TDO, TGFBETA, T14, TIGIT, TIM3, TLR, TLR2, TLR4, TLR5, TLR9, TMEF1, TNFa, TNFRSF7, Tp55, TREM1, TSLP, TSLPR, TWEAK, VEGF, VISTA, Vstm3, or WUCAM. Any and all disclosure herein in relation to targets for antigen binding polypeptides of the invention is generally applicable, and applies equally and without reservation to each and every antigen binding polypeptide and antigen binding polypeptide complex described herein. For the avoidance of doubt, the VL1, VL2, VL3, VL4, VH1, VH2, VH3 and/or VH4 of each and every antigen binding polypeptide and antigen binding polypeptide complex described herein may independently bind to any one of said particularly preferred targets.

[0215] In other aspects, the invention is directed to an antigen binding polypeptide complex comprising a first polypeptide and a second polypeptide; wherein the first polypeptide has a structure represented by VL1-VL2-VH2-VH1-CH1; VH1-VH2-VL2-VL1-CH1; VL1-VL2-VH2-VH1-CL; VH1-VH2-VL2-VL1-CL; VL1-VL2-VH2-VH1-CH1-CL; VH1-VH2-VL2-VL1-CH1-CL; VL1-VL2-VH2-VH1-CL-CH1; VH1-VH2-VL2-VL1-CL-CH1; VL1-L1-VL2-L2-VH2-L3-VH1-L4-CH1; VH1-L1-VH2-L2-VL2-L3-VL1-L4-CH1; VL1-L1-VL2-L2-VH2-L3-VH1-L4-CL; VH1-L1- VH2-L2-VL2-L3-VL1-L4-CL; VL1-L1-VL2-L2-VH2-L3-VH1-L4-CH1-L5-CL; VH1-L1-VH2-L2-VL2-L3-VL1-L4-CH1- L5-CL; VL1-L1-VL2-L2-VH2-L3-VH1-L4-CL-L5-CH1; or VH1-L1-VH2-L2-VL2-L3-VL1-L4-CL-L5-CH1; wherein the second polypeptide has a structure represented by VL3-VL4-VH4-VH3-CH1; VH3-VH4-VL4-VL3-CH1; VL3-VL4-VH4-VH3-CL; VH3-VH4-VL4-VL3-CL; VL3-VL4-VH4-VH3-CH1-CL; VH3-VH4-VL4-VL3-CH1-CL; VL3-VL4-VH4-VH3-CL-CH1; VH3-VH4-VL4-VL3-CL-CH1; VL3-L6-VL4-L7-VH4-L8-VH3-L9-CH1; VH3-L6-VH4-L7-VL4-L8-VL3-L9-CH1; VL3-L6-VL4-L7-VH4-L8-VH3-L9-CL; VH3-L6-VH4-L7-VL4-L8-VL3-L9-CL; VL3-L6-VL4- L7-VH4-L8-VH3-L9-CH1-L10-CL; VH3-L6-VH4-L7-VL4-L8-VL3-L9-CH1-L10-CL; VL3-L6-VL4-L7-VH4-L8-VH3-L9-CL-L10-CH1; or VH3-L6-VH4-L7-VL4-L8-VL3-L9-CL-L10-CH1; wherein VL1 is a first immunoglobulin light chain variable region that specifically binds to A2AR, APRIL, ATPDase, BAFF, BAFFR, BCMA, BlyS, BTK, BTLA, B7DC, B7H1, B7H2, B7H3, B7H4, B7H5, B7H6, B7H7, B7RP1, B7-4, C3, C5, CCL2, CCL3, CCL4, CCL5, CCL7, CCL8, CCL11, CCL15, CCL17, CCL19, CCL20, CCL21, CCL25 CCR3, CCR4, CD3, CD16A, CD19, CD20, CD24, CD27, CD28, CD30, CD38, CD39, CD40, CD40L, CD47, CD52, CD70, CD80, CD86, CD123, CD133, CD137, CD137L, CD160, CD272, CEACAM5, CLEC9, CLEC91, CRTH2, CSF-1, CSF-2, CSF-3, CXCL1, CXCL2, CXCL4, CXCL12, CXCL13, CXCR3, cMet, CTLA4, DLL3, DLL4, DNGR-1, E-cadherin, EGFR, ENTPD1, EpCAM, FCER1, FCER1A, FCER2, FGFR, FLAP, FOLH1, Gi24, GITR, GITRL, GPR5, GP100, GPRC5D, HER2, HER3, ICOSL, ICOS, HHLA2, HMGB1, HVEM, IDO, IFNa, IgE, IGF1R, IL2Rbeta, IL1, ILIA, IL1B, IL1F10, IL2, IL4, IL4Ra, IL5, IL5R, IL6, IL7, IL7Ra, IL8, IL9, IL9R, IL10, rhIL1O, IL12, IL13, IL13Ra1, IL13Ra2, IL15, IL17, IL17Rb, IL18, IL22, IL23, IL25, IL7, IL33, IL35, ITGB4, ITK, KIR, LAG3, LAMP1, leptin, LPFS2, MHC class II, MUC-1, MUC-16, NCR3LG1, NKG2D, NKp46, NTPDase-1, OX40, OX40L, PD-1, PD-L1, PD-L2, PROM1, S152, SIRPalpha, SISP1, SLC, SPG64, ST2, STEAP1, STEAP2, Syk kinase, STEAP1, TROP2, TACI, TDO, TGFBETA, T14, TIGIT, TIM3, TLR, TLR2, TLR4, TLR5, TLR9, TMEF1, TNFa, TNFRSF7, Tp55, TREM1, TSLP, TSLPR, TWEAK, VEGF, VISTA, Vstm3, or WUCAM; VL2 is a second immunoglobulin light chain variable region that specifically binds to A2AR, APRIL, ATPDase, BAFF, BAFFR, BCMA, BlyS, BTK, BTLA, B7DC, B7H1, B7H2, B7H3, B7H4, B7H5, B7H6, B7H7, B7RP1, B7-4, C3, C5, CCL2, CCL3, CCL4, CCL5, CCL7, CCL8, CCL11, CCL15, CCL17, CCL19, CCL20, CCL21, CCL25 CCR3, CCR4, CD3, CD16A, CD19, CD20, CD24, CD27, CD28, CD30, CD38, CD39, CD40, CD40L, CD47, CD52, CD70, CD80, CD86, CD123, CD133, CD137, CD137L, CD160, CD272, CEACAM5, CLEC9, CLEC91, CRTH2, CSF-1, CSF-2, CSF-3, CXCL1, CXCL2, CXCL4, CXCL12, CXCL13, CXCR3, cMet, CTLA4, DLL3, DLL4, DNGR-1, E-cadherin, EGFR, ENTPD1, EpCAM, FCER1, FCER1A, FCER2, FGFR, FLAP, FOLH1, Gi24, GITR, GITRL, GPR5, GP100, GPRC5D, HER2, HER3, ICOSL, ICOS, HHLA2, HMGB1, HVEM, IDO, IFNa, IgE, IGF1R, IL2Rbeta, IL1, ILIA, IL1B, IL1F10, IL2, IL4, IL4Ra, IL5, IL5R, IL6, IL7, IL7Ra, IL8, IL9, IL9R, IL10, rhIL1O, IL12, IL13, IL13Ra1, IL13Ra2, IL15, IL17, IL17Rb, IL18, IL22, IL23, IL25, IL7, IL33, IL35, ITGB4, ITK, KIR, LAG3, LAMP1, leptin, LPFS2, MHC class II, MUC-1, MUC-16, NCR3LG1, NKG2D, NKp46, NTPDase-1, OX40, OX40L, PD-1, PD-L1, PD-L2, PROM1, S152, SIRPalpha, SISP1, SLC, SPG64, ST2, STEAP1, STEAP2, Syk kinase, STEAP1, TROP2, TACI, TDO, TGFBETA, T14, TIGIT, TIM3, TLR, TLR2, TLR4, TLR5, TLR9, TMEF1, TNFa, TNFRSF7, Tp55, TREM1, TSLP, TSLPR, TWEAK, VEGF, VISTA, Vstm3, or WUCAM; VL3 is a third immunoglobulin light chain variable region that specifically binds to A2AR, APRIL, ATPDase, BAFF, BAFFR, BCMA, BlyS, BTK, BTLA, B7DC, B7H1, B7H2, B7H3, B7H4, B7H5, B7H6, B7H7, B7RP1, B7-4, C3, C5, CCL2, CCL3, CCL4, CCL5, CCL7, CCL8, CCL11, CCL15, CCL17, CCL19, CCL20, CCL21, CCL25 CCR3, CCR4, CD3, CD16A, CD19, CD20, CD24, CD27, CD28, CD30, CD38, CD39, CD40, CD40L, CD47, CD52, CD70, CD80, CD86, CD123, CD133, CD137, CD137L, CD160, CD272, CEACAM5, CLEC9, CLEC91, CRTH2, CSF-1, CSF-2, CSF-3, CXCL1, CXCL2, CXCL4, CXCL12, CXCL13, CXCR3, cMet, CTLA4, DLL3, DLL4, DNGR-1, E-cadherin, EGFR, ENTPD1, EpCAM, FCER1, FCER1A, FCER2, FGFR, FLAP, FOLH1, Gi24, GITR, GITRL, GPR5, GP100, GPRC5D, HER2, HER3, ICOSL, ICOS, HHLA2, HMGB1, HVEM, IDO, IFNa, IgE, IGF1R, IL2Rbeta, IL1, ILIA, IL1B, IL1F10, IL2, IL4, IL4Ra, IL5, IL5R, IL6, IL7, IL7Ra, IL8, IL9, IL9R, IL10, rhIL1O, IL12, IL13, IL13Ra1, IL13Ra2, IL15, IL17, IL17Rb, IL18, IL22, IL23, IL25, IL7, IL33, IL35, ITGB4, ITK, KIR, LAG3, LAMP1, leptin, LPFS2, MHC class II, MUC-1, MUC-16, NCR3LG1, NKG2D, NKp46, NTPDase-1, OX40, OX40L, PD-1, PD-L1, PD-L2, PROM1, S152, SIRPalpha, SISP1, SLC, SPG64, ST2, STEAP1, STEAP2, Syk kinase, STEAP1, TROP2, TACI, TDO, TGFBETA, T14, TIGIT, TIM3, TLR, TLR2, TLR4, TLR5, TLR9, TMEF1, TNFa, TNFRSF7, Tp55, TREM1, TSLP, TSLPR, TWEAK, VEGF, VISTA, Vstm3, or WUCAM; VL4 is a fourth immunoglobulin light chain variable region that specifically binds to A2AR, APRIL, ATPDase, BAFF, BAFFR, BCMA, BlyS, BTK, BTLA, B7DC, B7H1, B7H2, B7H3, B7H4, B7H5, B7H6, B7H7, B7RP1, B7-4, C3, C5, CCL2, CCL3, CCL4, CCL5, CCL7, CCL8, CCL11, CCL15, CCL17, CCL19, CCL20, CCL21, CCL25 CCR3, CCR4, CD3, CD16A, CD19, CD20, CD24, CD27, CD28, CD30, CD38, CD39, CD40, CD40L, CD47, CD52, CD70, CD80, CD86, CD123, CD133, CD137, CD137L, CD160, CD272, CEACAM5, CLEC9, CLEC91, CRTH2, CSF-1, CSF-2, CSF-3, CXCL1, CXCL2, CXCL4, CXCL12, CXCL13, CXCR3, cMet, CTLA4, DLL3, DLL4, DNGR-1, E-cadherin, EGFR, ENTPD1, EpCAM, FCER1, FCER1A, FCER2, FGFR, FLAP, FOLH1, Gi24, GITR, GITRL, GPR5, GP100, GPRC5D, HER2, HER3, ICOSL, ICOS, HHLA2, HMGB1, HVEM, IDO, IFNa, IgE, IGF1R, IL2Rbeta, IL1, ILIA, IL1B, IL1F10, IL2, IL4, IL4Ra, IL5, IL5R, IL6, IL7, IL7Ra, IL8, IL9, IL9R, IL10, rhIL1O, IL12, IL13, IL13Ra1, IL13Ra2, IL15, IL17, IL17Rb, IL18, IL22, IL23, IL25, IL7, IL33, IL35, ITGB4, ITK, KIR, LAG3, LAMP1, leptin, LPFS2, MHC class II, MUC-1, MUC-16, NCR3LG1, NKG2D, NKp46, NTPDase-1, OX40, OX40L, PD-1, PD-L1, PD-L2, PROM1, S152, SIRPalpha, SISP1, SLC, SPG64, ST2, STEAP1, STEAP2, Syk kinase, STEAP1, TROP2, TACI, TDO, TGFBETA, T14, TIGIT, TIM3, TLR, TLR2, TLR4, TLR5, TLR9, TMEF1, TNFa, TNFRSF7, Tp55, TREM1, TSLP, TSLPR, TWEAK, VEGF, VISTA, Vstm3, or WUCAM; VH1 is a first immunoglobulin heavy chain variable region that specifically binds to A2AR, APRIL, ATPDase, BAFF, BAFFR, BCMA, BlyS, BTK, BTLA, B7DC, B7H1, B7H2, B7H3, B7H4, B7H5, B7H6, B7H7, B7RP1, B7-4, C3, C5, CCL2, CCL3, CCL4, CCL5, CCL7, CCL8, CCL11, CCL15, CCL17, CCL19, CCL20, CCL21, CCL25 CCR3, CCR4, CD3, CD16A, CD19, CD20, CD24, CD27, CD28, CD30, CD38, CD39, CD40, CD40L, CD47, CD52, CD70, CD80, CD86, CD123, CD133, CD137, CD137L, CD160, CD272, CEACAM5, CLEC9, CLEC91, CRTH2, CSF-1, CSF-2, CSF-3, CXCL1, CXCL2, CXCL4, CXCL12, CXCL13, CXCR3, cMet, CTLA4, DLL3, DLL4, DNGR-1, E-cadherin, EGFR, ENTPD1, EpCAM, FCER1, FCER1A, FCER2, FGFR, FLAP, FOLH1, Gi24, GITR, GITRL, GPR5, GP100, GPRC5D, HER2, HER3, ICOSL, ICOS, HHLA2, HMGB1, HVEM, IDO, IFNa, IgE, IGF1R, IL2Rbeta, IL1, ILIA, IL1B, IL1F10, IL2, IL4, IL4Ra, IL5, IL5R, IL6, IL7, IL7Ra, IL8, IL9, IL9R, IL10, rhIL1O, IL12, IL13, IL13Ra1, IL13Ra2, IL15, IL17, IL17Rb, IL18, IL22, IL23, IL25, IL7, IL33, IL35, ITGB4, ITK, KIR, LAG3, LAMP1, leptin, LPFS2, MHC class II, MUC-1, MUC-16, NCR3LG1, NKG2D, NKp46, NTPDase-1, OX40, OX40L, PD-1, PD-L1, PD-L2, PROM1, S152, SIRPalpha, SISP1, SLC, SPG64, ST2, STEAP1, STEAP2, Syk kinase, STEAP1, TROP2, TACI, TDO, TGFBETA, T14, TIGIT, TIM3, TLR, TLR2, TLR4, TLR5, TLR9, TMEF1, TNFa, TNFRSF7, Tp55, TREM1, TSLP, TSLPR, TWEAK, VEGF, VISTA, Vstm3, or WUCAM; VH2 is a second immunoglobulin heavy chain variable region that specifically binds to A2AR, APRIL, ATPDase, BAFF, BAFFR, BCMA, BlyS, BTK, BTLA, B7DC, B7H1, B7H2, B7H3, B7H4, B7H5, B7H6, B7H7, B7RP1, B7-4, C3, C5, CCL2, CCL3, CCL4, CCL5, CCL7, CCL8, CCL11, CCL15, CCL17, CCL19, CCL20, CCL21, CCL25 CCR3, CCR4, CD3, CD16A, CD19, CD20, CD24, CD27, CD28, CD30, CD38, CD39, CD40, CD40L, CD47, CD52, CD70, CD80, CD86, CD123, CD133, CD137, CD137L, CD160, CD272, CEACAM5, CLEC9, CLEC91, CRTH2, CSF-1, CSF-2, CSF-3, CXCL1, CXCL2, CXCL4, CXCL12, CXCL13, CXCR3, cMet, CTLA4, DLL3, DLL4, DNGR-1, E-cadherin, EGFR, ENTPD1, EpCAM, FCER1, FCER1A, FCER2, FGFR, FLAP, FOLH1, Gi24, GITR, GITRL, GPR5, GP100, GPRC5D, HER2, HER3, ICOSL, ICOS, HHLA2, HMGB1, HVEM, IDO, IFNa, IgE, IGF1R, IL2Rbeta, IL1, ILIA, IL1B, IL1F10, IL2, IL4, IL4Ra, IL5, IL5R, IL6, IL7, IL7Ra, IL8, IL9, IL9R, IL10, rhIL1O, IL12, IL13, IL13Ra1, IL13Ra2, IL15, IL17, IL17Rb, IL18, IL22, IL23, IL25, IL7, IL33, IL35, ITGB4, ITK, KIR, LAG3, LAMP1, leptin, LPFS2, MHC class II, MUC-1, MUC-16, NCR3LG1, NKG2D, NKp46, NTPDase-1, OX40, OX40L, PD-1, PD-L1, PD-L2, PROM1, S152, SIRPalpha, SISP1, SLC, SPG64, ST2, STEAP1, STEAP2, Syk kinase, STEAP1, TROP2, TACI, TDO, TGFBETA, T14, TIGIT, TIM3, TLR, TLR2, TLR4, TLR5, TLR9, TMEF1, TNFa, TNFRSF7, Tp55, TREM1, TSLP, TSLPR, TWEAK, VEGF, VISTA, Vstm3, or WUCAM; VH3 is a third immunoglobulin heavy chain variable region that specifically binds to A2AR, APRIL, ATPDase, BAFF, BAFFR, BCMA, BlyS, BTK, BTLA, B7DC, B7H1, B7H2, B7H3, B7H4, B7H5, B7H6, B7H7, B7RP1, B7-4, C3, C5, CCL2, CCL3, CCL4, CCL5, CCL7, CCL8, CCL11, CCL15, CCL17, CCL19, CCL20, CCL21, CCL25 CCR3, CCR4, CD3, CD16A, CD19, CD20, CD24, CD27, CD28, CD30, CD38, CD39, CD40, CD40L, CD47, CD52, CD70, CD80, CD86, CD123, CD133, CD137, CD137L, CD160, CD272, CEACAM5, CLEC9, CLEC91, CRTH2, CSF-1, CSF-2, CSF-3, CXCL1, CXCL2, CXCL4, CXCL12, CXCL13, CXCR3, cMet, CTLA4, DLL3, DLL4, DNGR-1, E-cadherin, EGFR, ENTPD1, EpCAM, FCER1, FCER1A, FCER2, FGFR, FLAP, FOLH1, Gi24, GITR, GITRL, GPR5, GP100, GPRC5D, HER2, HER3, ICOSL, ICOS, HHLA2, HMGB1, HVEM, IDO, IFNa, IgE, IGF1R, IL2Rbeta, IL1, ILIA, IL1B, IL1F10, IL2, IL4, IL4Ra, IL5, IL5R, IL6, IL7, IL7Ra, IL8, IL9, IL9R, IL10, rhIL1O, IL12, IL13, IL13Ra1, IL13Ra2, IL15, IL17, IL17Rb, IL18, IL22, IL23, IL25, IL7, IL33, IL35, ITGB4, ITK, KIR, LAG3, LAMP1, leptin, LPFS2, MHC class II, MUC-1, MUC-16, NCR3LG1, NKG2D, NKp46, NTPDase-1, OX40, OX40L, PD-1, PD-L1, PD-L2, PROM1, S152, SIRPalpha, SISP1, SLC, SPG64, ST2, STEAP1, STEAP2, Syk kinase, STEAP1, TROP2, TACI, TDO, TGFBETA, T14, TIGIT, TIM3, TLR, TLR2, TLR4, TLR5, TLR9, TMEF1, TNFa, TNFRSF7, Tp55, TREM1, TSLP, TSLPR, TWEAK, VEGF, VISTA, Vstm3, or WUCAM; VH4 is a fourth immunoglobulin heavy chain variable region that specifically binds to A2AR, APRIL, ATPDase, BAFF, BAFFR, BCMA, BlyS, BTK, BTLA, B7DC, B7H1, B7H2, B7H3, B7H4, B7H5, B7H6, B7H7, B7RP1, B7-4, C3, C5, CCL2, CCL3, CCL4, CCL5, CCL7, CCL8, CCL11, CCL15, CCL17, CCL19, CCL20, CCL21, CCL25 CCR3, CCR4, CD3, CD16A, CD19, CD20, CD24, CD27, CD28, CD30, CD38, CD39, CD40, CD40L, CD47, CD52, CD70, CD80, CD86, CD123, CD133, CD137, CD137L, CD160, CD272, CEACAM5, CLEC9, CLEC91, CRTH2, CSF-1, CSF-2, CSF-3, CXCL1, CXCL2, CXCL4, CXCL12, CXCL13, CXCR3, cMet, CTLA4, DLL3, DLL4, DNGR-1, E-cadherin, EGFR, ENTPD1, EpCAM, FCER1, FCER1A, FCER2, FGFR, FLAP, FOLH1, Gi24, GITR, GITRL, GPR5, GP100, GPRC5D, HER2, HER3, ICOSL, ICOS, HHLA2, HMGB1, HVEM, IDO, IFNa, IgE, IGF1R, IL2Rbeta, IL1, ILIA, IL1B, IL1F10, IL2, IL4, IL4Ra, IL5, IL5R, IL6, IL7, IL7Ra, IL8, IL9, IL9R, IL10, rhIL1O, IL12, IL13, IL13Ra1, IL13Ra2, IL15, IL17, IL17Rb, IL18, IL22, IL23, IL25, IL7, IL33, IL35, ITGB4, ITK, KIR, LAG3, LAMP1, leptin, LPFS2, MHC class II, MUC-1, MUC-16, NCR3LG1, NKG2D, NKp46, NTPDase-1, OX40, OX40L, PD-1, PD-L1, PD-L2, PROM1, S152, SIRPalpha, SISP1, SLC, SPG64, ST2, STEAP1, STEAP2, Syk kinase, STEAP1, TROP2, TACI, TDO, TGFBETA, T14, TIGIT, TIM3, TLR, TLR2, TLR4, TLR5, TLR9, TMEF1, TNFa, TNFRSF7, Tp55, TREM1, TSLP, TSLPR, TWEAK, VEGF, VISTA, Vstm3, or WUCAM; CH1 is an immunoglobulin heavy chain constant region 1; CL is an immunoglobulin light chain constant region; and L1, L2, L3, L4, L5, L6, L7, L8, L9 and L10 are amino acid linkers. In some aspects, the first polypeptide has a structure represented by VL1-VL2-VH2-VH1-CH1, and the second polypeptide has a structure represented by VL3-VL4-VH4-VH3-CH1; VH3-VH4-VL4-VL3-CH1; VL3-VL4-VH4-VH3-CL; VH3-VH4-VL4-VL3-CL; VL3-VL4-VH4-VH3-CH1-CL; VH3-VH4-VL4-VL3-CH1-CL; VL3-VL4-VH4-VH3-CL-CH1; VH3-VH4-VL4-VL3-CL-CH1; VL3-L6-VL4-L7-VH4-L8-VH3-L9-CH1; VH3-L6-VH4-L7-VL4-L8-VL3-L9-CH1; VL3-L6-VL4-L7-VH4-L8-VH3-L9-CL; VH3-L6-VH4-L7-VL4-L8-VL3-L9-CL; VL3-L6- VL4-L7-VH4-L8-VH3-L9-CH1-L10-CL; VH3-L6-VH4-L7-VL4-L8-VL3-L9-CH1-L10-CL; VL3-L6-VL4-L7-VH4-L8-VH3-L9-CL-L10-CH1; or VH3-L6-VH4-L7-VL4-L8-VL3-L9-CL-L10-CH1. In some aspects, the first polypeptide has a structure represented by VH1-VH2-VL2-VL1-CH1, and the second polypeptide has a structure represented by VL3-VL4-VH4-VH3-CH1; VH3-VH4-VL4-VL3-CH1; VL3-VL4-VH4-VH3-CL; VH3-VH4-VL4-VL3-CL; VL3-VL4-VH4-VH3-CH1-CL; VH3-VH4-VL4-VL3-CH1-CL; VL3-VL4-VH4-VH3-CL-CH1; VH3-VH4-VL4-VL3-CL-CH1; VL3-L6-VL4-L7-VH4-L8-VH3-L9-CH1; VH3-L6-VH4-L7-VL4-L8-VL3-L9-CH1; VL3-L6-VL4-L7-VH4-L8-VH3-L9-CL; VH3-L6-VH4-L7-VL4-L8-VL3-L9-CL; VL3-L6-VL4-L7-VH4-L8-VH3-L9-CH1-L10-CL; VH3-L6-VH4-L7-VL4- L8-VL3-L9-CH1-L10-CL; VL3-L6-VL4-L7-VH4-L8-VH3-L9-CL-L10-CH1; or VH3-L6-VH4-L7-VL4-L8-VL3-L9-CL-L10-CH1. In some aspects, the first polypeptide has a structure represented by VL1-VL2-VH2-VH1-CL, and the second polypeptide has a structure represented by VL3-VL4-VH4-VH3-CH1; VH3-VH4-VL4-VL3-CH1; VL3-VL4-VH4-VH3-CL; VH3-VH4-VL4-VL3-CL; VL3-VL4-VH4-VH3-CH1-CL; VH3-VH4-VL4-VL3-CH1-CL; VL3-VL4-VH4-VH3-CL-CH1; VH3-VH4-VL4-VL3-CL-CH1; VL3-L6-VL4-L7-VH4-L8-VH3-L9-CH1; VH3-L6-VH4-L7-VL4-L8-VL3-L9-CH1; VL3-L6-VL4-L7-VH4-L8-VH3-L9-CL; VH3-L6-VH4-L7-VL4-L8-VL3-L9-CL; VL3-L6-VL4-L7-VH4- L8-VH3-L9-CH1-L10-CL; VH3-L6-VH4-L7-VL4-L8-VL3-L9-CH1-L10-CL; VL3-L6-VL4-L7-VH4-L8-VH3-L9-CL-L10-CH1; or VH3-L6-VH4-L7-VL4-L8-VL3-L9-CL-L10-CH1. In some aspects, the first polypeptide has a structure represented by VH1-VH2-VL2-VL1-CL, and the second polypeptide has a structure represented by VL3-VL4-VH4-VH3-CH1; VH3-VH4-VL4-VL3-CH1; VL3-VL4-VH4-VH3-CL; VH3-VH4-VL4-VL3-CL; VL3-VL4-VH4-VH3-CH1-CL; VH3-VH4-VL4-VL3-CH1-CL; VL3-VL4-VH4-VH3-CL-CH1; VH3-VH4-VL4-VL3-CL-CH1; VL3-L6-VL4-L7-VH4-L8-VH3-L9-CH1; VH3-L6-VH4-L7-VL4-L8-VL3-L9-CH1; VL3-L6-VL4-L7-VH4-L8-VH3-L9-CL; VH3- L6-VH4-L7-VL4-L8-VL3-L9-CL; VL3-L6-VL4-L7-VH4-L8-VH3-L9-CH1-L10-CL; VH3-L6-VH4-L7-VL4-L8-VL3- L9-CH1-L10-CL; VL3-L6-VL4-L7-VH4-L8-VH3-L9-CL-L10-CH1; or VH3-L6-VH4-L7-VL4-L8-VL3-L9-CL-L10-CH1. In some aspects, the first polypeptide has a structure represented by VL1-VL2-VH2-VH1-CH1-CL, and the second polypeptide has a structure represented by VL3-VL4-VH4-VH3-CH1; VH3-VH4-VL4-VL3-CH1; VL3-VL4-VH4-VH3-CL; VH3-VH4-VL4-VL3-CL; VL3-VL4-VH4-VH3-CH1-CL; VH3-VH4-VL4-VL3-CH1-CL; VL3-VL4-VH4-VH3-CL-CH1; VH3-VH4-VL4-VL3-CL-CH1; VL3-L6-VL4-L7-VH4-L8-VH3-L9-CH1; VH3-L6-VH4-L7-VL4-L8-VL3-L9-CH1; VL3-L6-VL4-L7-VH4-L8-VH3-L9-CL; VH3-L6-VH4-L7-VL4-L8-VL3-L9-CL; VL3-L6-VL4-L7-VH4- L8-VH3-L9-CH1-L10-CL; VH3-L6-VH4-L7-VL4-L8-VL3-L9-CH1-L10-CL; VL3-L6-VL4-L7-VH4-L8-VH3-L9-CL-L10-CH1; or VH3-L6-VH4-L7-VL4-L8-VL3-L9-CL-L10-CH1. In some aspects, the first polypeptide has a structure represented by VH1-VH2-VL2-VL1-CH1-CL, and the second polypeptide has a structure represented by VL3-VL4-VH4-VH3-CH1; VH3-VH4-VL4-VL3-CH1; VL3-VL4-VH4-VH3-CL; VH3-VH4-VL4-VL3-CL; VL3-VL4-VH4-VH3-CH1-CL; VH3-VH4-VL4-VL3-CH1-CL; VL3-VL4-VH4-VH3-CL-CH1; VH3-VH4-VL4-VL3-CL-CH1; VL3-L6-VL4-L7-VH4-L8-VH3-L9-CH1; VH3-L6-VH4-L7-VL4-L8-VL3-L9-CH1; VL3-L6-VL4-L7-VH4-L8-VH3-L9-CL; VH3-L6-VH4-L7-VL4-L8-VL3-L9-CL; VL3-L6-VL4-L7-VH4-L8-VH3-L9-CH1-L10-CL; VH3-L6-VH4-L7-VL4-L8-VL3- L9-CH1-L10-CL; VL3-L6-VL4-L7-VH4-L8-VH3-L9-CL-L10-CH1; or VH3-L6-VH4-L7-VL4-L8-VL3-L9-CL-L10-CH1. In some aspects, the first polypeptide has a structure represented by VL1-VL2-VH2-VH1-CL-CH1, and the second polypeptide has a structure represented by VL3-VL4-VH4-VH3-CH1; VH3-VH4-VL4-VL3-CH1; VL3-VL4-VH4-VH3-CL; VH3-VH4-VL4-VL3-CL; VL3-VL4-VH4-VH3-CH1-CL; VH3-VH4-VL4-VL3-CH1-CL; VL3-VL4-VH4-VH3-CL-CH1; VH3-VH4-VL4-VL3-CL-CH1; VL3-L6-VL4-L7-VH4-L8-VH3-L9-CH1; VH3-L6-VH4-L7-VL4-L8-VL3-L9-CH1; VL3-L6-VL4-L7-VH4-L8-VH3-L9-CL; VH3-L6-VH4-L7-VL4-L8-VL3-L9-CL; VL3-L6-VL4-L7-VH4- L8-VH3-L9-CH1-L10-CL; VH3-L6-VH4-L7-VL4-L8-VL3-L9-CH1-L10-CL; VL3-L6-VL4-L7-VH4-L8-VH3-L9-CL-L10-CH1; or VH3-L6-VH4-L7-VL4-L8-VL3-L9-CL-L10-CH1. In some aspects, the first polypeptide has a structure represented by VH1-VH2-VL2-VL1-CL-CH1, and the second polypeptide has a structure represented by VL3-VL4-VH4-VH3-CH1; VH3-VH4-VL4-VL3-CH1; VL3-VL4-VH4-VH3-CL; VH3-VH4-VL4-VL3-CL; VL3-VL4-VH4-VH3-CH1-CL; VH3-VH4-VL4-VL3-CH1-CL; VL3-VL4-VH4-VH3-CL-CH1; VH3-VH4-VL4-VL3-CL-CH1; VL3-L6-VL4-L7-VH4-L8-VH3-L9-CH1; VH3-L6-VH4-L7-VL4-L8-VL3-L9-CH1; VL3-L6-VL4-L7-VH4-L8-VH3-L9-CL; VH3-L6-VH4-L7-VL4-L8-VL3-L9-CL; VL3-L6-VL4-L7-VH4-L8-VH3-L9-CH1-L10-CL; VH3-L6-VH4-L7-VL4-L8-VL3- L9-CH1-L10-CL; VL3-L6-VL4-L7-VH4-L8-VH3-L9-CL-L10-CH1; or VH3-L6-VH4-L7-VL4-L8-VL3-L9-CL-L10-CH1. In some aspects, the first polypeptide has a structure represented by VL1-L1-VL2-L2-VH2-L3-VH1-L4-CH1, and the second polypeptide has a structure represented by VL3-VL4-VH4-VH3-CH1; VH3-VH4-VL4-VL3-CH1; VL3-VL4-VH4-VH3-CL; VH3-VH4-VL4-VL3-CL; VL3-VL4-VH4-VH3-CH1-CL; VH3-VH4-VL4-VL3-CH1-CL; VL3-VL4-VH4-VH3-CL-CH1; VH3-VH4-VL4-VL3-CL-CH1; VL3-L6-VL4-L7-VH4-L8-VH3-L9-CH1; VH3-L6-VH4-L7-VL4-L8-VL3-L9-CH1; VL3-L6-VL4-L7-VH4-L8-VH3-L9-CL; VH3-L6-VH4-L7-VL4-L8-VL3-L9-CL; VL3-L6-VL4- L7-VH4-L8-VH3-L9-CH1-L10-CL; VH3-L6-VH4-L7-VL4-L8-VL3-L9-CH1-L10-CL; VL3-L6-VL4-L7-VH4-L8-VH3-L9-CL-L10-CH1; or VH3-L6-VH4-L7-VL4-L8-VL3-L9-CL-L10-CH1. In some aspects, the first polypeptide has a structure represented by VH1-L1-VH2-L2-VL2-L3-VL1-L4-CH1, and the second polypeptide has a structure represented by VL3-VL4-VH4-VH3-CH1; VH3-VH4-VL4-VL3-CH1; VL3-VL4-VH4-VH3-CL; VH3-VH4-VL4-VL3-CL; VL3-VL4-VH4-VH3-CH1-CL; VH3-VH4-VL4-VL3-CH1-CL; VL3-VL4-VH4-VH3-CL-CH1; VH3-VH4-VL4-VL3-CL-CH1; VL3-L6-VL4-L7-VH4-L8-VH3-L9-CH1; VH3-L6-VH4-L7-VL4-L8-VL3-L9-CH1; VL3-L6-VL4- L7-VH4-L8-VH3-L9-CL; VH3-L6-VH4-L7-VL4-L8-VL3-L9-CL; VL3-L6-VL4-L7-VH4-L8-VH3-L9-CH1-L10-CL; VH3-L6-VH4-L7-VL4-L8-VL3-L9-CH1-L10-CL; VL3-L6-VL4-L7-VH4-L8-VH3-L9-CL-L10-CH1; or VH3-L6-VH4-L7-VL4-L8-VL3-L9-CL-L10-CH1. In some aspects, the first polypeptide has a structure represented by VL1-L1-VL2-L2-VH2-L3-VH1-L4-CL, and the second polypeptide has a structure represented by VL3-VL4-VH4-VH3-CH1; VH3-VH4-VL4-VL3-CH1; VL3-VL4-VH4-VH3-CL; VH3-VH4-VL4-VL3-CL; VL3-VL4-VH4-VH3-CH1-CL; VH3-VH4-VL4-VL3-CH1-CL; VL3-VL4-VH4-VH3-CL-CH1; VH3-VH4-VL4-VL3-CL-CH1; VL3-L6-VL4-L7-VH4-L8-VH3-L9-CH1; VH3-L6-VH4-L7-VL4-L8-VL3-L9-CH1; VL3-L6-VL4-L7-VH4-L8-VH3-L9-CL; VH3-L6-VH4-L7- VL4-L8-VL3-L9-CL; VL3-L6-VL4-L7-VH4-L8-VH3-L9-CH1-L10-CL; VH3-L6-VH4-L7-VL4-L8-VL3-L9-CH1-L10-CL; VL3-L6-VL4-L7-VH4-L8-VH3-L9-CL-L10-CH1; or VH3-L6-VH4-L7-VL4-L8-VL3-L9-CL-L10-CH1. In some aspects, the first polypeptide has a structure represented by VH1-L1-VH2-L2-VL2-L3-VL1-L4-CL, and the second polypeptide has a structure represented by VL3-VL4-VH4-VH3-CH1; VH3-VH4-VL4-VL3-CH1; VL3-VL4-VH4-VH3-CL; VH3-VH4-VL4-VL3-CL; VL3-VL4-VH4-VH3-CH1-CL; VH3-VH4-VL4-VL3-CH1-CL; VL3-VL4-VH4-VH3-CL-CH1; VH3-VH4-VL4-VL3-CL-CH1; VL3-L6-VL4-L7-VH4-L8-VH3-L9-CH1; VH3-L6-VH4-L7-VL4-L8-VL3-L9-CH1; VL3-L6-VL4-L7-VH4-L8-VH3-L9-CL; VH3-L6-VH4-L7-VL4-L8-VL3-L9-CL; VL3-L6-VL4-L7-VH4- L8-VH3-L9-CH1-L10-CL; VH3-L6-VH4-L7-VL4-L8-VL3-L9-CH1-L10-CL; VL3-L6-VL4-L7-VH4-L8-VH3-L9-CL-L10-CH1; or VH3-L6-VH4-L7-VL4-L8-VL3-L9-CL-L10-CH1. In some aspects, the first polypeptide has a structure represented by VL1-L1-VL2-L2-VH2-L3-VH1-L4-CH1-L5-CL, and the second polypeptide has a structure represented by VL3-VL4-VH4-VH3-CH1; VH3-VH4-VL4-VL3-CH1; VL3-VL4-VH4-VH3-CL; VH3-VH4-VL4-VL3-CL; VL3-VL4-VH4-VH3-CH1-CL; VH3-VH4-VL4-VL3-CH1-CL; VL3-VL4-VH4-VH3-CL-CH1; VH3-VH4-VL4-VL3-CL-CH1; VL3-L6-VL4-L7-VH4-L8-VH3-L9-CH1; VH3-L6-VH4-L7-VL4-L8-VL3-L9-CH1; VL3-L6-VL4-L7-VH4- L8-VH3-L9-CL; VH3-L6-VH4-L7-VL4-L8-VL3-L9-CL; VL3-L6-VL4-L7-VH4-L8-VH3-L9-CH1-L10-CL; VH3-L6-VH4-L7-VL4-L8-VL3-L9-CH1-L10-CL; VL3-L6-VL4-L7-VH4-L8-VH3-L9-CL-L10-CH1; or VH3-L6-VH4-L7-VL4-L8-VL3-L9-CL-L10-CH1. In some aspects, the first polypeptide has a structure represented by VH1-L1-VH2-L2-VL2-L3-VL1-L4-CH1-L5-CL, and the second polypeptide has a structure represented by VL3-VL4-VH4-VH3-CH1; VH3-VH4-VL4-VL3-CH1; VL3-VL4-VH4-VH3-CL; VH3-VH4-VL4-VL3-CL; VL3-VL4-VH4-VH3-CH1-CL; VH3-VH4-VL4-VL3-CH1-CL; VL3-VL4-VH4-VH3-CL-CH1; VH3-VH4-VL4-VL3-CL-CH1; VL3-L6-VL4-L7-VH4-L8-VH3-L9-CH1; VH3-L6-VH4-L7-VL4-L8-VL3-L9-CH1; VL3-L6-VL4-L7-VH4-L8-VH3-L9-CL; VH3-L6-VH4-L7- VL4-L8-VL3-L9-CL; VL3-L6-VL4-L7-VH4-L8-VH3-L9-CH1-L10-CL; VH3-L6-VH4-L7-VL4-L8-VL3-L9-CH1-L10-CL; VL3-L6-VL4-L7-VH4-L8-VH3-L9-CL-L10-CH1; or VH3-L6-VH4-L7-VL4-L8-VL3-L9-CL-L10-CH1. In some aspects, the first polypeptide has a structure represented by VL1-L1-VL2-L2-VH2-L3-VH1-L4-CL-L5-CH1, and the second polypeptide has a structure represented by VL3-VL4-VH4-VH3-CH1; VH3-VH4-VL4-VL3-CH1; VL3-VL4-VH4-VH3-CL; VH3-VH4-VL4-VL3-CL; VL3-VL4-VH4-VH3-CH1-CL; VH3-VH4-VL4-VL3-CH1-CL; VL3-VL4-VH4-VH3-CL-CH1; VH3-VH4-VL4-VL3-CL-CH1; VL3-L6-VL4-L7-VH4-L8-VH3-L9-CH1; VH3-L6-VH4-L7-VL4-L8-VL3-L9-CH1; VL3-L6-VL4-L7-VH4-L8-VH3-L9-CL; VH3-L6-VH4-L7-VL4-L8-VL3-L9-CL; VL3-L6-VL4- L7-VH4-L8-VH3-L9-CH1-L10-CL; VH3-L6-VH4-L7-VL4-L8-VL3-L9-CH1-L10-CL; VL3-L6-VL4-L7-VH4-L8-VH3-L9-CL-L10-CH1; or VH3-L6-VH4-L7-VL4-L8-VL3-L9-CL-L10-CH1. In some aspects, the first polypeptide has a structure represented by VH1-L1-VH2-L2-VL2-L3-VL1-L4-CL-L5-CH1, and the second polypeptide has a structure represented by VL3-VL4-VH4-VH3-CH1; VH3-VH4-VL4-VL3-CH1; VL3-VL4-VH4-VH3-CL; VH3-VH4-VL4-VL3-CL; VL3-VL4-VH4-VH3-CH1-CL; VH3-VH4-VL4-VL3-CH1-CL; VL3-VL4-VH4-VH3-CL-CH1; VH3-VH4-VL4-VL3-CL-CH1; VL3-L6-VL4-L7-VH4-L8-VH3-L9-CH1; VH3-L6-VH4-L7-VL4-L8-VL3-L9-CH1; VL3-L6-VL4- L7-VH4-L8-VH3-L9-CL; VH3-L6-VH4-L7-VL4-L8-VL3-L9-CL; VL3-L6-VL4-L7-VH4-L8-VH3-L9-CH1-L10-CL; VH3-L6-VH4-L7-VL4-L8-VL3-L9-CH1-L10-CL; VL3-L6-VL4-L7-VH4-L8-VH3-L9-CL-L10-CH1; or VH3-L6-VH4-L7-VL4-L8-VL3-L9-CL-L10-CH1. In some aspects, the VL1, VL2, VL3, VL4, VH1, VH2, VH3 and/or VH4 specifically binds to A2AR, APRIL, ATPDase, BAFF, BAFFR, BCMA, BlyS, BTK, BTLA, B7DC, B7H1, B7H2, B7H3, B7H4, B7H5, B7H6, B7H7, B7RP1, B7-4, C3, C5, CCL2, CCL3, CCL4, CCL5, CCL7, CCL8, CCL11, CCL15, CCL17, CCL19, CCL20, CCL21, CCL25 CCR3, CCR4, CD3, CD16A, CD19, CD20, CD24, CD27, CD28, CD30, CD38, CD39, CD40, CD40L, CD47, CD52, CD70, CD80, CD86, CD123, CD133, CD137, CD137L, CD160, CD272, CEACAM5, CLEC9, CLEC91, CRTH2, CSF-1, CSF-2, CSF-3, CXCL1, CXCL2, CXCL4, CXCL12, CXCL13, CXCR3, cMet, CTLA4, DLL3, DLL4, DNGR-1, E-cadherin, EGFR, ENTPD1, EpCAM, FCER1, FCER1A, FCER2, FGFR, FLAP, FOLH1, Gi24, GITR, GITRL, GPR5, GP100, GPRC5D, HER2, HER3, ICOSL, ICOS, HHLA2, HMGB1, HVEM, IDO, IFNa, IgE, IGF1R, IL2Rbeta, IL1, ILIA, IL1B, IL1F10, IL2, IL4, IL4Ra, IL5, IL5R, IL6, IL7, IL7Ra, IL8, IL9, IL9R, IL10, rhIL1O, IL12, IL13, IL13Ra1, IL13Ra2, IL15, IL17, IL17Rb, IL18, IL22, IL23, IL25, IL7, IL33, IL35, ITGB4, ITK, KIR, LAG3, LAMP1, leptin, LPFS2, MHC class II, MUC-1, MUC-16, NCR3LG1, NKG2D, NKp46, NTPDase-1, OX40, OX40L, PD-1, PD-L1, PD-L2, PROM1, S152, SIRPalpha, SISP1, SLC, SPG64, ST2, STEAP1, STEAP2, Syk kinase, STEAP1, TROP2, TACI, TDO, TGFBETA, T14, TIGIT, TIM3, TLR, TLR2, TLR4, TLR5, TLR9, TMEF1, TNFa, TNFRSF7, Tp55, TREM1, TSLP, TSLPR, TWEAK, VEGF, VISTA, Vstm3, or WUCAM. Any and all disclosure herein in relation to targets for antigen binding polypeptides of the invention is generally applicable, and applies equally and without reservation to each and every antigen binding polypeptide and antigen binding polypeptide complex described herein. For the avoidance of doubt, the VL1, VL2, VL3, VL4, VH1, VH2, VH3 and/or VH4 of each and every antigen binding polypeptide and antigen binding polypeptide complex described herein may independently bind to any one of said particularly preferred targets.

[0216] In other aspects, the invention is directed to an antigen binding polypeptide complex comprising a first polypeptide and a second polypeptide; wherein the first polypeptide has a structure represented by VL1-VL2-VH2-VH1-CH1-Fc; VH1-VH2-VL2-VL1-CH1-Fc; VL1-VL2-VH2-VH1-CL-Fc; VH1-VH2-VL2-VL1-CL-Fc; VL1-VL2-VH2-VH1-CH1-CL-Fc; VH1-VH2-VL2-VL1-CH1-CL-Fc; VL1-VL2-VH2-VH1-CL-CH1-Fc; VH1-VH2-VL2-VL1-CL-CH1-Fc; VL1-L1-VL2-L2-VH2-L3-VH1-L4-CH1-Fc; VH1-L1-VH2-L2-VL2-L3-VL1-L4-CH1-Fc; VL1-L1-VL2-L2-VH2-L3-VH1-L4-CL-Fc; VH1-L1-VH2-L2-VL2-L3-VL1-L4-CL-Fc; VL1-L1-VL2-L2-VH2-L3-VH1-L4-CH1-L5-CL- Fc; VH1-L1-VH2-L2-VL2-L3-VL1-L4-CH1-L5-CL-Fc; VL1-L1-VL2-L2-VH2-L3-VH1-L4-CL-L5-CH1-Fc; or VH1-L1-VH2-L2-VL2-L3-VL1-L4-CL-L5-CH1-Fc; wherein the second polypeptide has a structure represented by VL3-VL4-VH4-VH3-CH1-Fc; VH3-VH4-VL4-VL3-CH1-Fc; VL3-VL4-VH4-VH3-CL-Fc; VH3-VH4-VL4-VL3-CL-Fc; VL3-VL4-VH4-VH3-CH1-CL-Fc; VH3-VH4-VL4-VL3-CH1-CL-Fc; VL3-VL4-VH4-VH3-CL-CH1-Fc; VH3-VH4-VL4-VL3-CL-CH1-Fc; VL3-L6-VL4-L7-VH4-L8-VH3-L9-CH1-Fc; VH3-L6-VH4-L7-VL4-L8-VL3-L9-CH1-Fc; VL3-L6-VL4-L7-VH4-L8-VH3-L9-CL-Fc; VH3-L6-VH4-L7-VL4-L8-VL3-L9-CL-Fc; VL3-L6-VL4-L7-VH4-L8-VH3-L9-CH1-L10-CL-Fc; VH3-L6-VH4-L7-VL4-L8-VL3-L9-CH1-L10-CL-Fc; VL3-L6-VL4-L7-VH4-L8-VH3-L9-CL-L10-CH1-Fc; or VH3-L6-VH4-L7-VL4-L8-VL3-L9-CL-L10-CH1-Fc; wherein VL1 is a first immunoglobulin light chain variable region that specifically binds to A2AR, APRIL, ATPDase, BAFF, BAFFR, BCMA, BlyS, BTK, BTLA, B7DC, B7H1, B7H2, B7H3, B7H4, B7H5, B7H6, B7H7, B7RP1, B7-4, C3, C5, CCL2, CCL3, CCL4, CCL5, CCL7, CCL8, CCL11, CCL15, CCL17, CCL19, CCL20, CCL21, CCL25 CCR3, CCR4, CD3, CD16A, CD19, CD20, CD24, CD27, CD28, CD30, CD38, CD39, CD40, CD40L, CD47, CD52, CD70, CD80, CD86, CD123, CD133, CD137, CD137L, CD160, CD272, CEACAM5, CLEC9, CLEC91, CRTH2, CSF-1, CSF-2, CSF-3, CXCL1, CXCL2, CXCL4, CXCL12, CXCL13, CXCR3, cMet, CTLA4, DLL3, DLL4, DNGR-1, E-cadherin, EGFR, ENTPD1, EpCAM, FCER1, FCER1A, FCER2, FGFR, FLAP, FOLH1, Gi24, GITR, GITRL, GPR5, GP100, GPRC5D, HER2, HER3, ICOSL, ICOS, HHLA2, HMGB1, HVEM, IDO, IFNa, IgE, IGF1R, IL2Rbeta, IL1, ILIA, IL1B, IL1F10, IL2, IL4, IL4Ra, IL5, IL5R, IL6, IL7, IL7Ra, IL8, IL9, IL9R, IL10, rhIL1O, IL12, IL13, IL13Ra1, IL13Ra2, IL15, IL17, IL17Rb, IL18, IL22, IL23, IL25, IL7, IL33, IL35, ITGB4, ITK, KIR, LAG3, LAMP1, leptin, LPFS2, MHC class II, MUC-1, MUC-16, NCR3LG1, NKG2D, NKp46, NTPDase-1, OX40, OX40L, PD-1, PD-L1, PD-L2, PROM1, S152, SIRPalpha, SISP1, SLC, SPG64, ST2, STEAP1, STEAP2, Syk kinase, STEAP1, TROP2, TACI, TDO, TGFBETA, T14, TIGIT, TIM3, TLR, TLR2, TLR4, TLR5, TLR9, TMEF1, TNFa, TNFRSF7, Tp55, TREM1, TSLP, TSLPR, TWEAK, VEGF, VISTA, Vstm3, or WUCAM; VL2 is a second immunoglobulin light chain variable region that specifically binds to A2AR, APRIL, ATPDase, BAFF, BAFFR, BCMA, BlyS, BTK, BTLA, B7DC, B7H1, B7H2, B7H3, B7H4, B7H5, B7H6, B7H7, B7RP1, B7-4, C3, C5, CCL2, CCL3, CCL4, CCL5, CCL7, CCL8, CCL11, CCL15, CCL17, CCL19, CCL20, CCL21, CCL25 CCR3, CCR4, CD3, CD16A, CD19, CD20, CD24, CD27, CD28, CD30, CD38, CD39, CD40, CD40L, CD47, CD52, CD70, CD80, CD86, CD123, CD133, CD137, CD137L, CD160, CD272, CEACAM5, CLEC9, CLEC91, CRTH2, CSF-1, CSF-2, CSF-3, CXCL1, CXCL2, CXCL4, CXCL12, CXCL13, CXCR3, cMet, CTLA4, DLL3, DLL4, DNGR-1, E-cadherin, EGFR, ENTPD1, EpCAM, FCER1, FCER1A, FCER2, FGFR, FLAP, FOLH1, Gi24, GITR, GITRL, GPR5, GP100, GPRC5D, HER2, HER3, ICOSL, ICOS, HHLA2, HMGB1, HVEM, IDO, IFNa, IgE, IGF1R, IL2Rbeta, IL1, ILIA, IL1B, IL1F10, IL2, IL4, IL4Ra, IL5, IL5R, IL6, IL7, IL7Ra, IL8, IL9, IL9R, IL10, rhIL1O, IL12, IL13, IL13Ra1, IL13Ra2, IL15, IL17, IL17Rb, IL18, IL22, IL23, IL25, IL7, IL33, IL35, ITGB4, ITK, KIR, LAG3, LAMP1, leptin, LPFS2, MHC class II, MUC-1, MUC-16, NCR3LG1, NKG2D, NKp46, NTPDase-1, OX40, OX40L, PD-1, PD-L1, PD-L2, PROM1, S152, SIRPalpha, SISP1, SLC, SPG64, ST2, STEAP1, STEAP2, Syk kinase, STEAP1, TROP2, TACI, TDO, TGFBETA, T14, TIGIT, TIM3, TLR, TLR2, TLR4, TLR5, TLR9, TMEF1, TNFa, TNFRSF7, Tp55, TREM1, TSLP, TSLPR, TWEAK, VEGF, VISTA, Vstm3, or WUCAM; VL3 is a third immunoglobulin light chain variable region that specifically binds to A2AR, APRIL, ATPDase, BAFF, BAFFR, BCMA, BlyS, BTK, BTLA, B7DC, B7H1, B7H2, B7H3, B7H4, B7H5, B7H6, B7H7, B7RP1, B7-4, C3, C5, CCL2, CCL3, CCL4, CCL5, CCL7, CCL8, CCL11, CCL15, CCL17, CCL19, CCL20, CCL21, CCL25 CCR3, CCR4, CD3, CD16A, CD19, CD20, CD24, CD27, CD28, CD30, CD38, CD39, CD40, CD40L, CD47, CD52, CD70, CD80, CD86, CD123, CD133, CD137, CD137L, CD160, CD272, CEACAM5, CLEC9, CLEC91, CRTH2, CSF-1, CSF-2, CSF-3, CXCL1, CXCL2, CXCL4, CXCL12, CXCL13, CXCR3, cMet, CTLA4, DLL3, DLL4, DNGR-1, E-cadherin, EGFR, ENTPD1, EpCAM, FCER1, FCER1A, FCER2, FGFR, FLAP, FOLH1, Gi24, GITR, GITRL, GPR5, GP100, GPRC5D, HER2, HER3, ICOSL, ICOS, HHLA2, HMGB1, HVEM, IDO, IFNa, IgE, IGF1R, IL2Rbeta, IL1, ILIA, IL1B, IL1F10, IL2, IL4, IL4Ra, IL5, IL5R, IL6, IL7, IL7Ra, IL9, IL9R, IL10, rhIL1O, IL12, IL13, IL13Ra1, IL13Ra2, IL15, IL17, IL17Rb, IL18, IL22, IL23, IL25, IL7, IL33, IL35, ITGB4, ITK, KIR, LAG3, LAMP1, leptin, LPFS2, MHC class II, MUC-1, MUC-16, NCR3LG1, NKG2D, NKp46, NTPDase-1, OX40, OX40L, PD-1, PD-L1, PD-L2, PROM1, S152, SIRPalpha, SISP1, SLC, SPG64, ST2, STEAP1, STEAP2, Syk kinase, STEAP1, TROP2, TACI, TDO, TGFBETA, T14, TIGIT, TIM3, TLR, TLR2, TLR4, TLR5, TLR9, TMEF1, TNFa, TNFRSF7, Tp55, TREM1, TSLP, TSLPR, TWEAK, VEGF, VISTA, Vstm3, or WUCAM; VL4 is a fourth immunoglobulin light chain variable region that specifically binds to A2AR, APRIL, ATPDase, BAFF, BAFFR, BCMA, BlyS, BTK, BTLA, B7DC, B7H1, B7H2, B7H3, B7H4, B7H5, B7H6, B7H7, B7RP1, B7-4, C3, C5, CCL2, CCL3, CCL4, CCL5, CCL7, CCL8, CCL11, CCL15, CCL17, CCL19, CCL20, CCL21, CCL25 CCR3, CCR4, CD3, CD16A, CD19, CD20, CD24, CD27, CD28, CD30, CD38, CD39, CD40, CD40L, CD47, CD52, CD70, CD80, CD86, CD123, CD133, CD137, CD137L, CD160, CD272, CEACAM5, CLEC9, CLEC91, CRTH2, CSF-1, CSF-2, CSF-3, CXCL1, CXCL2, CXCL4, CXCL12, CXCL13, CXCR3, cMet, CTLA4, DLL3, DLL4, DNGR-1, E-cadherin, EGFR, ENTPD1, EpCAM, FCER1, FCER1A, FCER2, FGFR, FLAP, FOLH1, Gi24, GITR, GITRL, GPR5, GP100, GPRC5D, HER2, HER3, ICOSL, ICOS, HHLA2, HMGB1, HVEM, IDO, IFNa, IgE, IGF1R, IL2Rbeta, IL1, ILIA, IL1B, IL1F10, IL2, IL4, IL4Ra, IL5, IL5R, IL6, IL7, IL7Ra, IL8, IL9, IL9R, IL10, rhIL1O, IL12, IL13, IL13Ra1, IL13Ra2, IL15, IL17, IL17Rb, IL18, IL22, IL23, IL25, IL7, IL33, IL35, ITGB4, ITK, KIR, LAG3, LAMP1, leptin, LPFS2, MHC class II, MUC-1, MUC-16, NCR3LG1, NKG2D, NKp46, NTPDase-1, OX40, OX40L, PD-1, PD-L1, PD-L2, PROM1, S152, SIRPalpha, SISP1, SLC, SPG64, ST2, STEAP1, STEAP2, Syk kinase, STEAP1, TROP2, TACI, TDO, TGFBETA, T14, TIGIT, TIM3, TLR, TLR2, TLR4, TLR5, TLR9, TMEF1, TNFa, TNFRSF7, Tp55, TREM1, TSLP, TSLPR, TWEAK, VEGF, VISTA, Vstm3, or WUCAM; VH1 is a first immunoglobulin heavy chain variable region that specifically binds to A2AR, APRIL, ATPDase, BAFF, BAFFR, BCMA, BlyS, BTK, BTLA, B7DC, B7H1, B7H2, B7H3, B7H4, B7H5, B7H6, B7H7, B7RP1, B7-4, C3, C5, CCL2, CCL3, CCL4, CCL5, CCL7, CCL8, CCL11, CCL15, CCL17, CCL19, CCL20, CCL21, CCL25 CCR3, CCR4, CD3, CD16A, CD19, CD20, CD24, CD27, CD28, CD30, CD38, CD39, CD40, CD40L, CD47, CD52, CD70, CD80, CD86, CD123, CD133, CD137, CD137L, CD160, CD272, CEACAM5, CLEC9, CLEC91, CRTH2, CSF-1, CSF-2, CSF-3, CXCL1, CXCL2, CXCL4, CXCL12, CXCL13, CXCR3, cMet, CTLA4, DLL3, DLL4, DNGR-1, E-cadherin, EGFR, ENTPD1, EpCAM, FCER1, FCER1A, FCER2, FGFR, FLAP, FOLH1, Gi24, GITR, GITRL, GPRS, GP100, GPRC5D, HER2, HER3, ICOSL, ICOS, HHLA2, HMGB1, HVEM, IDO, IFNa, IgE, IGF1R, IL2Rbeta, IL1, ILIA, IL1B, IL1F10, IL2, IL4, IL4Ra, IL5, IL5R, IL6, IL7, IL7Ra, IL8, IL9, IL9R, IL10, rhIL1O, IL12, IL13, IL13Ra1, IL13Ra2, IL15, IL17, IL17Rb, IL18, IL22, IL23, IL25, IL7, IL33, IL35, ITGB4, ITK, KIR, LAG3, LAMP1, leptin, LPFS2, MHC class II, MUC-1, MUC-16, NCR3LG1, NKG2D, NKp46, NTPDase-1, OX40, OX40L, PD-1, PD-L1, PD-L2, PROM1, S152, SIRPalpha, SISP1, SLC, SPG64, ST2, STEAP1, STEAP2, Syk kinase, STEAP1, TROP2, TACI, TDO, TGFBETA, T14, TIGIT, TIM3, TLR, TLR2, TLR4, TLR5, TLR9, TMEF1, TNFa, TNFRSF7, Tp55, TREM1, TSLP, TSLPR, TWEAK, VEGF, VISTA, Vstm3, or WUCAM; VH2 is a second immunoglobulin heavy chain variable region that specifically binds to A2AR, APRIL, ATPDase, BAFF, BAFFR, BCMA, BlyS, BTK, BTLA, B7DC, B7H1, B7H2, B7H3, B7H4, B7H5, B7H6, B7H7, B7RP1, B7-4, C3, C5, CCL2, CCL3, CCL4, CCLS, CCL7, CCL8, CCL11, CCL15, CCL17, CCL19, CCL20, CCL21, CCL25 CCR3, CCR4, CD3, CD16A, CD19, CD20, CD24, CD27, CD28, CD30, CD38, CD39, CD40, CD40L, CD47, CD52, CD70, CD80, CD86, CD123, CD133, CD137, CD137L, CD160, CD272, CEACAM5, CLEC9, CLEC91, CRTH2, CSF-1, CSF-2, CSF-3, CXCL1, CXCL2, CXCL4, CXCL12, CXCL13, CXCR3, cMet, CTLA4, DLL3, DLL4, DNGR-1, E-cadherin, EGFR, ENTPD1, EpCAM, FCER1, FCER1A, FCER2, FGFR, FLAP, FOLH1, Gi24, GITR, GITRL, GPRS, GP100, GPRC5D, HER2, HER3, ICOSL, ICOS, HHLA2, HMGB1, HVEM, IDO, IFNa, IgE, IGF1R, IL2Rbeta, IL1, ILIA, IL1B, IL1F10, IL2, IL4, IL4Ra, IL5, IL5R, IL6, IL7, IL7Ra, IL8, IL9, IL9R, IL10, rhIL1O, IL12, IL13, IL13Ra1, IL13Ra2, IL15, IL17, IL17Rb, IL18, IL22, IL23, IL25, IL7, IL33, IL35, ITGB4, ITK, KIR, LAG3, LAMP1, leptin, LPFS2, MHC class II, MUC-1, MUC-16, NCR3LG1, NKG2D, NKp46, NTPDase-1, OX40, OX40L, PD-1, PD-L1, PD-L2, PROM1, S152, SIRPalpha, SISP1, SLC, SPG64, ST2, STEAP1, STEAP2, Syk kinase, STEAP1, TROP2, TACI, TDO, TGFBETA, T14, TIGIT, TIM3, TLR, TLR2, TLR4, TLR5, TLR9, TMEF1, TNFa, TNFRSF7, Tp55, TREM1, TSLP, TSLPR, TWEAK, VEGF, VISTA, Vstm3, or WUCAM; VH3 is a third immunoglobulin heavy chain variable region that specifically binds to A2AR, APRIL, ATPDase, BAFF, BAFFR, BCMA, BlyS, BTK, BTLA, B7DC, B7H1, B7H2, B7H3, B7H4, B7H5, B7H6, B7H7, B7RP1, B7-4, C3, C5, CCL2, CCL3, CCL4, CCLS, CCL7, CCL8, CCL11, CCL15, CCL17, CCL19, CCL20, CCL21, CCL25 CCR3, CCR4, CD3, CD16A, CD19, CD20, CD24, CD27, CD28, CD30, CD38, CD39, CD40, CD40L, CD47, CD52, CD70, CD80, CD86, CD123, CD133, CD137, CD137L, CD160, CD272, CEACAM5, CLEC9, CLEC91, CRTH2, CSF-1, CSF-2, CSF-3, CXCL1, CXCL2, CXCL4, CXCL12, CXCL13, CXCR3, cMet, CTLA4, DLL3, DLL4, DNGR-1, E-cadherin, EGFR, ENTPD1, EpCAM, FCER1, FCER1A, FCER2, FGFR, FLAP, FOLH1, Gi24, GITR, GITRL, GPRS, GP100, GPRC5D, HER2, HER3, ICOSL, ICOS, HHLA2, HMGB1, HVEM, IDO, IFNa, IgE, IGF1R, IL2Rbeta, IL1, ILIA, IL1B, IL1F10, IL2, IL4, IL4Ra, IL5, IL5R, IL6, IL7, IL7Ra, IL8, IL9, IL9R, IL10, rhIL1O, IL12, IL13, IL13Ra1, IL13Ra2, IL15, IL17, IL17Rb, IL18, IL22, IL23, IL25, IL7, IL33, IL35, ITGB4, ITK, KIR, LAG3, LAMP1, leptin, LPFS2, MHC class II, MUC-1, MUC-16, NCR3LG1, NKG2D, NKp46, NTPDase-1, OX40, OX40L, PD-1, PD-L1, PD-L2, PROM1, S152, SIRPalpha, SISP1, SLC, SPG64, ST2, STEAP1, STEAP2, Syk kinase, STEAP1, TROP2, TACI, TDO, TGFBETA, T14, TIGIT, TIM3, TLR, TLR2, TLR4, TLR5, TLR9, TMEF1, TNFa, TNFRSF7, Tp55, TREM1, TSLP, TSLPR, TWEAK, VEGF, VISTA, Vstm3, or WUCAM; VH4 is a fourth immunoglobulin heavy chain variable region that specifically binds to A2AR, APRIL, ATPDase, BAFF, BAFFR, BCMA, BlyS, BTK, BTLA, B7DC, B7H1, B7H2, B7H3, B7H4, B7H5, B7H6, B7H7, B7RP1, B7-4, C3, C5, CCL2, CCL3, CCL4, CCL5, CCL7, CCL8, CCL11, CCL15, CCL17, CCL19, CCL20, CCL21, CCL25 CCR3, CCR4, CD3, CD16A, CD19, CD20, CD24, CD27, CD28, CD30, CD38, CD39, CD40, CD40L, CD47, CD52, CD70, CD80, CD86, CD123, CD133, CD137, CD137L, CD160, CD272, CEACAM5, CLEC9, CLEC91, CRTH2, CSF-1, CSF-2, CSF-3, CXCL1, CXCL2, CXCL4, CXCL12, CXCL13, CXCR3, cMet, CTLA4, DLL3, DLL4, DNGR-1, E-cadherin, EGFR, ENTPD1, EpCAM, FCER1, FCER1A, FCER2, FGFR, FLAP, FOLH1, Gi24, GITR, GITRL, GPR5, GP100, GPRC5D, HER2, HER3, ICOSL, ICOS, HHLA2, HMGB1, HVEM, IDO, IFNa, IgE, IGF1R, IL2Rbeta, IL1, ILIA, IL1B, IL1F10, IL2, IL4, IL4Ra, IL5, IL5R, IL6, IL7, IL7Ra, IL8, IL9, IL9R, IL10, rhIL1O, IL12, IL13, IL13Ra1, IL13Ra2, IL15, IL17, IL17Rb, IL18, IL22, IL23, IL25, IL7, IL33, IL35, ITGB4, ITK, KIR, LAG3, LAMP1, leptin, LPFS2, MHC class II, MUC-1, MUC-16, NCR3LG1, NKG2D, NKp46, NTPDase-1, OX40, OX40L, PD-1, PD-L1, PD-L2, PROM1, S152, SIRPalpha, SISP1, SLC, SPG64, ST2, STEAP1, STEAP2, Syk kinase, STEAP1, TROP2, TACI, TDO, TGFBETA, T14, TIGIT, TIM3, TLR, TLR2, TLR4, TLR5, TLR9, TMEF1, TNFa, TNFRSF7, Tp55, TREM1, TSLP, TSLPR, TWEAK, VEGF, VISTA, Vstm3, or WUCAM; Fc is a region comprising an immunoglobulin heavy chain constant region 2 (CH2), an immunoglobulin heavy chain constant region 3 (CH3), and optionally, an immunoglobulin hinge; CH1 is an immunoglobulin heavy chain constant region 1; CL is an immunoglobulin light chain constant region; and L1, L2, L3, L4, L5, L6, L7, L8, L9 and L10 are amino acid linkers. In some aspects, the first polypeptide has a structure represented by VL1-VL2-VH2-VH1-CH1-Fc, and the second polypeptide has a structure represented by VL3-VL4-VH4-VH3-CH1-Fc; VH3-VH4-VL4-VL3-CH1-Fc; VL3-VL4-VH4-VH3-CL-Fc; VH3-VH4-VL4-VL3-CL-Fc; VL3-VL4-VH4-VH3-CH1-CL-Fe; VH3-VH4-VL4-VL3-CH1-CL-Fc; VL3-VL4-VH4-VH3-CL-CH1-Fc; VH3-VH4-VL4-VL3-CL-CH1-Fc; VL3-L6-VL4-L7-VH4-L8-VH3-L9-CH1-Fc; VH3-L6-VH4-L7-VL4-L8-VL3-L9-CH1-Fc; VL3-L6-VL4-L7-VH4-L8-VH3-L9-CL-Fc; VH3-L6-VH4-L7-VL4-L8-VL3-L9-CL-Fc; VL3-L6-VL4-L7-VH4-L8-VH3-L9-CH1-L10-CL-Fc; VH3-L6-VH4-L7-VL4-L8-VL3-L9-CH1-L10-CL-Fc; VL3-L6-VL4-L7-VH4-L8-VH3-L9-CL-L10-CH1-Fc; or VH3-L6-VH4-L7-VL4-L8-VL3-L9-CL-L10-CH1-F c. In some aspects, the first polypeptide has a structure represented by VH1-VH2-VL2-VL1-CH1-Fc, and the second polypeptide has a structure represented by VL3-VL4-VH4-VH3-CH1-Fc; VH3-VH4-VL4-VL3-CH1-Fc; VL3-VL4-VH4-VH3-CL-Fc; VH3-VH4-VL4-VL3-CL-Fc; VL3-VL4-VH4-VH3-CH1-CL-Fe; VH3-VH4-VL4-VL3-CH1-CL-Fc; VL3-VL4-VH4-VH3-CL-CH1-Fc; VH3-VH4-VL4-VL3-CL-CH1-Fc; VL3-L6-VL4-L7-VH4-L8-VH3-L9-CH1-Fc; VH3-L6-VH4-L7-VL4-L8-VL3-L9-CH1-Fc; VL3-L6-VL4-L7-VH4-L8-VH3-L9-CL-Fc; VH3-L6-VH4-L7-VL4-L8-VL3-L9-CL-Fc; VL3-L6-VL4-L7-VH4-L8-VH3-L9-CH1-L10-CL-Fc; VH3-L6-VH4-L7-VL4-L8-VL3-L9-CH1-L10-CL-Fc; VL3-L6-VL4-L7-VH4-L8-VH3-L9-CL-L10-CH1-Fc; or VH3-L6-VH4-L7-VL4-L8-VL3-L9-CL-L10-CH1-F c. In some aspects, the first polypeptide has a structure represented by VL1-VL2-VH2-VH1-CL-Fc, and the second polypeptide has a structure represented by VL3-VL4-VH4-VH3-CH1-Fc; VH3-VH4-VL4-VL3-CH1-Fc; VL3-VL4-VH4-VH3-CL-Fc; VH3-VH4-VL4-VL3-CL-Fc; VL3-VL4-VH4-VH3-CH1-CL-Fe; VH3-VH4-VL4-VL3-CH1-CL-Fc; VL3-VL4-VH4-VH3-CL-CH1-Fc; VH3-VH4-VL4-VL3-CL-CH1-Fc; VL3-L6-VL4-L7-VH4-L8-VH3-L9-CH1-Fc; VH3-L6-VH4-L7-VL4-L8-VL3-L9-CH1-Fc; VL3-L6-VL4-L7-VH4-L8-VH3-L9-CL-Fc; VH3-L6-VH4-L7-VL4-L8-VL3-L9-CL-Fc; VL3-L6-VL4-L7-VH4-L8-VH3-L9-CH1-L10-CL-Fc; VH3-L6-VH4-L7-VL4-L8-VL3-L9-CH1-L10-CL-Fc; VL3-L6-VL4-L7-VH4-L8-VH3-L9-CL-L10-CH1-Fc; or VH3-L6-VH4-L7-VL4-L8-VL3-L9-CL-L10-CH1-F c. In some aspects, the first polypeptide has a structure represented by VH1-VH2-VL2-VL1-CL-Fc, and the second polypeptide has a structure represented by VL3-VL4-VH4-VH3-CH1-Fc; VH3-VH4-VL4-VL3-CH1-Fc; VL3-VL4-VH4-VH3-CL-Fc; VH3-VH4-VL4-VL3-CL-Fc; VL3-VL4-VH4-VH3-CH1-CL-Fe; VH3-VH4-VL4-VL3-CH1-CL-Fc; VL3-VL4-VH4-VH3-CL-CH1-Fc; VH3-VH4-VL4-VL3-CL-CH1-Fc; VL3-L6-VL4-L7-VH4-L8-VH3-L9-CH1-Fc; VH3-L6-VH4-L7-VL4-L8-VL3-L9-CH1-Fc; VL3-L6-VL4-L7-VH4-L8-VH3-L9-CL-Fc; VH3-L6-VH4-L7-VL4-L8-VL3-L9-CL-Fc; VL3-L6-VL4-L7-VH4-L8-VH3-L9-CH1-L10-CL-Fc; VH3-L6-VH4-L7-VL4-L8-VL3-L9-CH1-L10-CL-Fc; VL3-L6-VL4-L7-VH4-L8-VH3-L9-CL-L10-CH1-Fc; or VH3-L6-VH4-L7-VL4-L8-VL3-L9-CL-L10-CH1-F c. In some aspects, the first polypeptide has a structure represented by VL1-VL2-VH2-VH1-CH1-CL-Fc, and the second polypeptide has a structure represented by VL3-VL4-VH4-VH3-CH1-Fc; VH3-VH4-VL4-VL3-CH1-Fc; VL3-VL4-VH4-VH3-CL-Fc; VH3-VH4-VL4-VL3-CL-Fc; VL3-VL4-VH4-VH3-CH1-CL-Fe; VH3-VH4-VL4-VL3-CH1-CL-Fc; VL3-VL4-VH4-VH3-CL-CH1-Fc; VH3-VH4-VL4-VL3-CL-CH1-Fc; VL3-L6-VL4-L7-VH4-L8-VH3-L9-CH1-Fc; VH3-L6-VH4-L7-VL4-L8-VL3-L9-CH1-Fc; VL3-L6-VL4-L7-VH4-L8-VH3-L9-CL-Fc; VH3-L6-VH4-L7-VL4-L8-VL3-L9-CL-Fc; VL3-L6-VL4-L7-VH4-L8-VH3-L9-CH1-L10-CL-Fc; VH3-L6-VH4-L7-VL4-L8-VL3-L9-CH1-L10-CL-Fc; VL3-L6-VL4-L7-VH4-L8-VH3-L9-CL-L10-CH1-Fc; or VH3-L6-VH4-L7-VL4-L8-VL3-L9-CL-L10-CH1-F c. In some aspects, the first polypeptide has a structure represented by VH1-VH2-VL2-VL1-CH1-CL-Fc, and the second polypeptide has a structure represented by VL3-VL4-VH4-VH3-CH1-Fc; VH3-VH4-VL4-VL3-CH1-Fc; VL3-VL4-VH4-VH3-CL-Fc; VH3-VH4-VL4-VL3-CL-Fc; VL3-VL4-VH4-VH3-CH1-CL-Fe; VH3-VH4-VL4-VL3-CH1-CL-Fc; VL3-VL4-VH4-VH3-CL-CH1-Fc; VH3-VH4-VL4-VL3-CL-CH1-Fc; VL3-L6-VL4-L7-VH4-L8-VH3-L9-CH1-Fc; VH3-L6-VH4-L7-VL4-L8-VL3-L9-CH1-Fc; VL3-L6-VL4-L7-VH4-L8-VH3-L9-CL-Fc; VH3-L6-VH4-L7-VL4-L8-VL3-L9-CL-Fc; VL3-L6-VL4-L7-VH4-L8-VH3-L9-CH1-L10-CL-Fc; VH3-L6-VH4-L7-VL4-L8-VL3-L9-CH1-L10-CL-Fc; VL3-L6-VL4-L7-VH4-L8-VH3-L9-CL-L10-CH1-Fc; or VH3-L6-VH4-L7-VL4-L8-VL3-L9-CL-L10-CH1-F c. In some aspects, the first polypeptide has a structure represented by VL1-VL2-VH2-VH1-CL-CH1-Fc, and the second polypeptide has a structure represented by VL3-VL4-VH4-VH3-CH1-Fc; VH3-VH4-VL4-VL3-CH1-Fc; VL3-VL4-VH4-VH3-CL-Fc; VH3-VH4-VL4-VL3-CL-Fc; VL3-VL4-VH4-VH3-CH1-CL-Fe; VH3-VH4-VL4-VL3-CH1-CL-Fc; VL3-VL4-VH4-VH3-CL-CH1-Fc; VH3-VH4-VL4-VL3-CL-CH1-Fc; VL3-L6-VL4-L7-VH4-L8-VH3-L9-CH1-Fc; VH3-L6-VH4-L7-VL4-L8-VL3-L9-CH1-Fc; VL3-L6-VL4-L7-VH4-L8-VH3-L9-CL-Fc; VH3-L6-VH4-L7-VL4-L8-VL3-L9-CL-Fc; VL3-L6-VL4-L7-VH4-L8-VH3-L9-CH1-L10-CL-Fc; VH3-L6-VH4-L7-VL4-L8-VL3-L9-CH1-L10-CL-Fc; VL3-L6-VL4-L7-VH4-L8-VH3-L9-CL-L10-CH1-Fc; or VH3-L6-VH4-L7-VL4-L8-VL3-L9-CL-L10-CH1-F c. In some aspects, the first polypeptide has a structure represented by VH1-VH2-VL2-VL1-CL-CH1-Fc, and the second polypeptide has a structure represented by VL3-VL4-VH4-VH3-CH1-Fc; VH3-VH4-VL4-VL3-CH1-Fc; VL3-VL4-VH4-VH3-CL-Fc; VH3-VH4-VL4-VL3-CL-Fc; VL3-VL4-VH4-VH3-CH1-CL-Fe; VH3-VH4-VL4-VL3-CH1-CL-Fc; VL3-VL4-VH4-VH3-CL-CH1-Fc; VH3-VH4-VL4-VL3-CL-CH1-Fc; VL3-L6-VL4-L7-VH4-L8-VH3-L9-CH1-Fc; VH3-L6-VH4-L7-VL4-L8-VL3-L9-CH1-Fc; VL3-L6-VL4-L7-VH4-L8-VH3-L9-CL-Fc; VH3-L6-VH4-L7-VL4-L8-VL3-L9-CL-Fc; VL3-L6-VL4-L7-VH4-L8-VH3-L9-CH1-L10-CL-Fc; VH3-L6-VH4-L7-VL4-L8-VL3-L9-CH1-L10-CL-Fc; VL3-L6-VL4-L7-VH4-L8-VH3-L9-CL-L10-CH1-Fc; or VH3-L6-VH4-L7-VL4-L8-VL3-L9-CL-L10-CH1-F c. In some aspects, the first polypeptide has a structure represented by VL1-L1-VL2-L2-VH2-L3-VH1-L4-CH1-Fe, and the second polypeptide has a structure represented by VL3-VL4-VH4-VH3-CH1-Fc; VH3-VH4-VL4-VL3-CH1-Fc; VL3-VL4-VH4-VH3-CL-Fc; VH3-VH4-VL4-VL3-CL-Fc; VL3-VL4-VH4-VH3-CH1-CL-Fc; VH3-VH4-VL4-VL3-CH1-CL-Fc; VL3-VL4-VH4-VH3-CL-CH1-Fc; VH3-VH4-VL4-VL3-CL-CH1-Fc; VL3-L6-VL4-L7-VH4-L8-VH3-L9-CH1-Fc; VH3-L6-VH4-L7-VL4-L8-VL3-L9-CH1-Fc; VL3-L6-VL4-L7-VH4-L8-VH3-L9-CL-Fc; VH3-L6-VH4-L7-VL4-L8-VL3-L9-CL-Fc; VL3-L6-VL4-L7-VH4-L8-VH3-L9-CH1-L10-CL-Fc; VH3-L6-VH4-L7-VL4-L8-VL3-L9-CH1-L10-CL-Fc; VL3-L6-VL4-L7-VH4-L8-VH3-L9-CL-L10-CH1-Fc; or VH3-L6-VH4-L7-VL4-L8-VL3-L9-CL-L10-CH1-Fc. In some aspects, the first polypeptide has a structure represented by VH1-L1-VH2-L2-VL2-L3-VL1-L4-CH1-Fe, and the second polypeptide has a structure represented by VL3-VL4-VH4-VH3-CH1-Fc; VH3-VH4-VL4-VL3-CH1-Fc; VL3-VL4-VH4-VH3-CL-Fc; VH3-VH4-VL4-VL3-CL-Fc; VL3-VL4-VH4-VH3-CH1-CL-Fc; VH3-VH4-VL4-VL3-CH1-CL-Fc; VL3-VL4-VH4-VH3-CL-CH1-Fc; VH3-VH4-VL4-VL3-CL-CH1-Fc; VL3-L6-VL4-L7-VH4-L8-VH3-L9-CH1-Fc; VH3-L6-VH4-L7-VL4-L8-VL3-L9-CH1-Fc; VL3-L6-VL4-L7-VH4-L8-VH3-L9-CL-Fc; VH3-L6-VH4-L7-VL4-L8-VL3-L9-CL-Fc; VL3-L6-VL4-L7-VH4-L8-VH3-L9-CH1-L10-CL-Fc; VH3-L6-VH4-L7-VL4-L8-VL3-L9-CH1-L10-CL-Fc; VL3-L6-VL4-L7-VH4-L8-VH3-L9-CL-L10-CH1-Fe; or VH3-L6-VH4-L7-VL4-L8-VL3-L9-CL-L10-CH1-Fe. In some aspects, the first polypeptide has a structure represented by VL1-L1-VL2-L2-VH2-L3-VH1-L4-CL-Fe, and the second polypeptide has a structure represented by VL3-VL4-VH4-VH3-CH1-Fc; VH3-VH4-VL4-VL3-CH1-Fc; VL3-VL4-VH4-VH3-CL-Fc; VH3-VH4-VL4-VL3-CL-Fc; VL3-VL4-VH4-VH3-CH1-CL-Fc; VH3-VH4-VL4-VL3-CH1-CL-Fc; VL3-VL4-VH4-VH3-CL-CH1-Fc; VH3-VH4-VL4-VL3-CL-CH1-Fc; VL3-L6-VL4-L7-VH4-L8-VH3-L9-CH1-Fc; VH3-L6-VH4-L7-VL4-L8-VL3-L9-CH1-Fc; VL3-L6-VL4-L7-VH4-L8-VH3-L9-CL-Fc; VH3-L6-VH4-L7-VL4-L8-VL3-L9-CL-Fc; VL3-L6-VL4-L7-VH4-L8-VH3-L9-CH1-L10-CL-Fc; VH3-L6-VH4-L7-VL4-L8-VL3-L9-CH1-L10-CL-Fe; VL3-L6-VL4-L7-VH4-L8-VH3-L9-CL-L10-CH1-Fe; or VH3-L6-VH4-L7-VL4-L8-VL3-L9-CL-L10-CH1-Fe. In some aspects, the first polypeptide has a structure represented by VH1-L1-VH2-L2-VL2-L3-VL1-L4-CL-Fe, and the second polypeptide has a structure represented by VL3-VL4-VH4-VH3-CH1-Fc; VH3-VH4-VL4-VL3-CH1-Fc; VL3-VL4-VH4-VH3-CL-Fc; VH3-VH4-VL4-VL3-CL-Fc; VL3-VL4-VH4-VH3-CH1-CL-Fc; VH3-VH4-VL4-VL3-CH1-CL-Fc; VL3-VL4-VH4-VH3-CL-CH1-Fc; VH3-VH4-VL4-VL3-CL-CH1-Fc; VL3-L6-VL4-L7-VH4-L8-VH3-L9-CH1-Fc; VH3-L6-VH4-L7-VL4-L8-VL3-L9-CH1-Fc; VL3-L6-VL4-L7-VH4-L8-VH3-L9-CL-Fc; VH3-L6-VH4-L7-VL4-L8-VL3-L9-CL-Fc; VL3-L6-VL4-L7-VH4-L8-VH3-L9-CH1-L10-CL-Fc; VH3-L6-VH4-L7-VL4-L8-VL3-L9-CH1-L10-CL-Fe; VL3-L6-VL4-L7-VH4-L8-VH3-L9-CL-L10-CH1-Fe; or VH3-L6-VH4-L7-VL4-L8-VL3-L9-CL-L10-CH1-Fe. In some aspects, the first polypeptide has a structure represented by VL1-L1-VL2-L2-VH2-L3-VH1-L4-CH1-L5-CL-Fe, and the second polypeptide has a structure represented by VL3-VL4-VH4-VH3-CH1-Fc; VH3-VH4-VL4-VL3-CH1-Fc; VL3-VL4-VH4-VH3-CL-Fc; VH3-VH4-VL4-VL3-CL-Fc; VL3-VL4-VH4-VH3-CH1-CL-Fc; VH3-VH4-VL4-VL3-CH1-CL-Fc; VL3-VL4-VH4-VH3-CL-CH1-Fc; VH3-VH4-VL4-VL3-CL-CH1-Fc; VL3-L6-VL4-L7-VH4-L8-VH3-L9-CH1-Fc; VH3-L6-VH4-L7-VL4-L8-VL3-L9-CH1-Fc; VL3-L6-VL4-L7-VH4-L8-VH3-L9-CL-Fc; VH3-L6-VH4-L7-VL4-L8-VL3-L9-CL-Fc; VL3-L6-VL4-L7-VH4-L8-VH3-L9-CH1-L10-CL-Fc; VH3-L6-VH4-L7-VL4-L8-VL3-L9-CH1-L10-CL-Fc; VL3-L6-VL4-L7-VH4-L8-VH3-L9-CL-L10-CH1-Fc; or VH3-L6-VH4-L7-VL4-L8-VL3-L9-CL-L10-CH1-Fe. In some aspects, the first polypeptide has a structure represented by VH1-L1-VH2-L2-VL2-L3-VL1-L4-CH1-L5-CL-Fe, and the second polypeptide has a structure represented by VL3-VL4-VH4-VH3-CH1-Fc; VH3-VH4-VL4-VL3-CH1-Fe; VL3-VL4-VH4-VH3-CL-Fc; VH3-VH4-VL4-VL3-CL-Fc; VL3-VL4-VH4-VH3-CH1-CL-Fc; VH3-VH4-VL4-VL3-CH1-CL-Fc; VL3-VL4-VH4-VH3-CL-CH1-Fc; VH3-VH4-VL4-VL3-CL-CH1-Fc; VL3-L6-VL4-L7-VH4-L8-VH3-L9-CH1-Fc; VH3-L6-VH4-L7-VL4-L8-VL3-L9-CH1-Fe; VL3-L6-VL4-L7-VH4- L8-VH3-L9-CL-Fc; VH3-L6-VH4-L7-VL4-L8-VL3-L9-CL-Fc; VL3-L6-VL4-L7-VH4-L8-VH3-L9-CH1-L10-CL-Fc; VH3-L6-VH4-L7-VL4-L8-VL3-L9-CH1-L10-CL-Fe; VL3-L6-VL4-L7-VH4-L8-VH3-L9-CL-L10-CH1-Fe; or VH3-L6-VH4-L7-VL4-L8-VL3-L9-CL-L10-CH1-Fe. In some aspects, the first polypeptide has a structure represented by VL1-L1-VL2-L2-VH2-L3-VH1-L4-CL-L5-CH1-Fc, and the second polypeptide has a structure represented by VL3-VL4-VH4-VH3-CH1-Fc; VH3-VH4-VL4-VL3-CH1-Fc; VL3-VL4-VH4-VH3-CL-Fc; VH3-VH4-VL4-VL3-CL-Fc; VL3-VL4-VH4-VH3-CH1-CL-Fc; VH3-VH4-VL4-VL3-CH1-CL-Fc; VL3-VL4-VH4-VH3-CL-CH1-Fc; VH3-VH4-VL4-VL3-CL-CH1-Fc; VL3-L6-VL4-L7-VH4-L8-VH3-L9-CH1-Fc; VH3-L6-VH4-L7-VL4-L8-VL3-L9-CH1-Fc; VL3-L6-VL4-L7-VH4-L8-VH3-L9-CL-Fc; VH3-L6-VH4-L7-VL4-L8-VL3-L9-CL-Fc; VL3-L6-VL4-L7-VH4-L8-VH3-L9-CH1-L10-CL-Fc; VH3-L6-VH4-L7-VL4-L8-VL3-L9-CH1-L10-CL-Fc; VL3-L6-VL4-L7-VH4-L8-VH3-L9-CL-L10-CH1-Fe; or VH3-L6-VH4-L7-VL4-L8-VL3-L9-CL-L10-CH1-Fe. In some aspects, the first polypeptide has a structure represented by VH1-L1-VH2-L2-VL2-L3-VL1-L4-CL-L5-CH1-Fc, and the second polypeptide has a structure represented by VL3-VL4-VH4-VH3-CH1-Fc; VH3-VH4-VL4-VL3-CH1-Fc; VL3-VL4-VH4-VH3-CL-Fc; VH3-VH4-VL4-VL3-CL-Fc; VL3-VL4-VH4-VH3-CH1-CL-Fe; VH3-VH4-VL4-VL3-CH1-CL-Fc; VL3-VL4-VH4-VH3-CL-CH1-Fc; VH3-VH4-VL4-VL3-CL-CH1-Fc; VL3-L6-VL4-L7-VH4-L8-VH3-L9-CH1-Fc; VH3-L6-VH4-L7-VL4-L8-VL3-L9-CH1-Fc; VL3-L6-VL4-L7-VH4-L8-VH3-L9-CL-Fc; VH3-L6-VH4-L7-VL4-L8-VL3-L9-CL-Fc; VL3-L6-VL4-L7-VH4-L8-VH3-L9-CH1-L10-CL-Fc; VH3-L6-VH4-L7-VL4-L8-VL3-L9-CH1-L10-CL-Fc; VL3-L6-VL4-L7-VH4-L8-VH3-L9-CL-L10-CH1-Fc; or VH3-L6-VH4-L7-VL4-L8-VL3-L9-CL-L10-CH1-Fc. In some aspects, the VL1, VL2, VL3, VL4, VH1, VH2, VH3 and/or VH4 specifically binds to A2AR, APRIL, ATPDase, BAFF, BAFFR, BCMA, BlyS, BTK, BTLA, B7DC, B7H1, B7H2, B7H3, B7H4, B7H5, B7H6, B7H7, B7RP1, B7-4, C3, C5, CCL2, CCL3, CCL4, CCL5, CCL7, CCL8, CCL11, CCL15, CCL17, CCL19, CCL20, CCL21, CCL25 CCR3, CCR4, CD3, CD16A, CD19, CD20, CD24, CD27, CD28, CD30, CD38, CD39, CD40, CD40L, CD47, CD52, CD70, CD80, CD86, CD123, CD133, CD137, CD137L, CD160, CD272, CEACAM5, CLEC9, CLEC91, CRTH2, CSF-1, CSF-2, CSF-3, CXCL1, CXCL2, CXCL4, CXCL12, CXCL13, CXCR3, cMet, CTLA4, DLL3, DLL4, DNGR-1, E-cadherin, EGFR, ENTPD1, EpCAM, FCER1, FCER1A, FCER2, FGFR, FLAP, FOLH1, Gi24, GITR, GITRL, GPR5, GP100, GPRC5D, HER2, HER3, ICOSL, ICOS, HHLA2, HMGB1, HVEM, IDO, IFNa, IgE, IGF1R, IL2Rbeta, IL1, ILIA, IL1B, IL1F10, IL2, IL4, IL4Ra, IL5, IL5R, IL6, IL7, IL7Ra, IL8, IL9, IL9R, IL10, rhIL1O, IL12, IL13, IL13Ra1, IL13Ra2, IL15, IL17, IL17Rb, IL18, IL22, IL23, IL25, IL7, IL33, IL35, ITGB4, ITK, KIR, LAG3, LAMP1, leptin, LPFS2, MHC class II, MUC-1, MUC-16, NCR3LG1, NKG2D, NKp46, NTPDase-1, OX40, OX40L, PD-1, PD-L1, PD-L2, PROM1, S152, SIRPalpha, SISP1, SLC, SPG64, ST2, STEAP1, STEAP2, Syk kinase, STEAP1, TROP2, TACI, TDO, TGFBETA, T14, TIGIT, TIM3, TLR, TLR2, TLR4, TLR5, TLR9, TMEF1, TNFa, TNFRSF7, Tp55, TREM1, TSLP, TSLPR, TWEAK, VEGF, VISTA, Vstm3, or WUCAM. Any and all disclosure herein in relation to targets for antigen binding polypeptides of the invention is generally applicable, and applies equally and without reservation to each and every antigen binding polypeptide and antigen binding polypeptide complex described herein. For the avoidance of doubt, the VL1, VL2, VL3, VL4, VH1, VH2, VH3 and/or VH4 of each and every antigen binding polypeptide and antigen binding polypeptide complex described herein may independently bind to any one of said particularly preferred targets.

[0217] In other aspects, the invention is directed to an antigen binding polypeptide complex comprising a first polypeptide and a second polypeptide; wherein the first polypeptide has a structure represented by VL1-VL2-VH2-VH1; VH1-VH2-VL2-VL1; VL1-L1-VL2-L2-VH2-L3-VH1; VH1-L1-VH2-L2-VL2-L3-VL1; VL1-VL2-VH2-VH1-Fc; VH1-VH2-VL2-VL1-Fc; VL1-L1-VL2-L2-VH2-L3-VH1-Fc; VH1-L1-VH2-L2-VL2-L3-VL1-Fc; VL1-L1-VL2-L2-VH2-L3-VH1-L4-Fc; VH1-L1-VH2-L2-VL2-L3-VL1-L4-Fc; VL1-VL2-VH2-VH1-CH1; VH1-VH2-VL2-VL1-CH1; VL1-VL2-VH2-VH1-CL; VH1-VH2-VL2-VL1-CL; VL1-VL2-VH2-VH1-CH1-CL; VH1-VH2-VL2-VL1-CH1-CL; VL1-VL2-VH2-VH1-CL-CH1; VH1-VH2-VL2-VL1-CL-CH1; VL1-L1-VL2-L2-VH2-L3-VH1-L4-CH1; VH1-L1-VH2-L2-VL2-L3-VL1-L4-CH1; VL1-L1-VL2-L2-VH2-L3-VH1-L4-CL; VH1-L1-VH2-L2-VL2-L3-VL1-L4-CL; VL1-L1-VL2- L2-VH2-L3-VH1-L4-CH1-L5-CL; VH1-L1-VH2-L2-VL2-L3-VL1-L4-CH1-L5-CL; VL1-L1-VL2-L2-VH2-L3-VH1- L4-CL-L5-CH1; VH1-L1-VH2-L2-VL2-L3-VL1-L4-CL-L5-CH1; VL1-VL2-VH2-VH1-CH1-Fc; VH1-VH2-VL2-VL1-CH1-Fc; VL1-VL2-VH2-VH1-CL-Fc; VH1-VH2-VL2-VL1-CL-Fc; VL1-VL2-VH2-VH1-CH1-CL-Fc; VH1-VH2-VL2-VL1-CH1-CL-Fc; VL1-VL2-VH2-VH1-CL-CH1-Fc; VH1-VH2-VL2-VL1-CL-CH1-Fc; VL1-L1-VL2-L2-VH2-L3-VH1-L4-CH1-Fc; VH1-L1-VH2-L2-VL2-L3-VL1-L4-CH1-Fc; VL1-L1-VL2-L2-VH2-L3-VH1-L4-CL-Fc; VH1-L1-VH2-L2-VL2-L3-VL1-L4-CL-Fc; VL1-L1-VL2-L2-VH2-L3-VH1-L4-CH1-L5-CL-Fe; VH1-L1-VH2-L2-VL2-L3-VL1-L4-CH1-L5-CL-Fe; VL1-L1-VL2-L2-VH2-L3-VH1-L4-CL-L5-CH1-Fc; or VH1-L1-VH2-L2-VL2-L3-VL1-L4-CL-L5-CH1-Fe; wherein the second polypeptide has a structure represented by VL3-VL4-VH4-VH3; VH3-VH4-VL4-VL3; VL3-L4-VL4-L5-VH4-L6-VH3; VH3-L4-VH4-L5-VL4-L6-VL3; VL3-VL4-VH4-VH3-Fc; VH3-VH4-VL4-VL3-Fc; VL3-L5-VL4-L6-VH4-L7-VH3-Fc; VH3-L5-VH4-L6-VL4-L7-VL3-Fc; VL3-L5-VL4-L6-VH4-L7-VH3-L8-Fc; VH3-L5-VH4-L6-VL4-L7-VL3-L8-Fc; VL3-VL4-VH4-VH3-CH1; VH3-VH4-VL4-VL3-CH1; VL3-VL4-VH4-VH3-CL; VH3-VH4-VL4-VL3-CL; VL3-VL4-VH4-VH3-CH1-CL; VH3-VH4-VL4-VL3-CH1-CL; VL3-VL4-VH4-VH3-CL-CH1; VH3-VH4-VL4-VL3-CL-CH1; VL3-L6-VL4-L7-VH4-L8-VH3-L9-CH1; VH3-L6-VH4-L7-VL4-L8-VL3-L9-CH1; VL3-L6-VL4-L7-VH4-L8-VH3-L9-CL; VH3-L6-VH4-L7-VL4-L8-VL3-L9-CL; VL3-L6-VL4-L7-VH4- L8-VH3-L9-CH1-L10-CL; VH3-L6-VH4-L7-VL4-L8-VL3-L9-CH1-L10-CL; VL3-L6-VL4-L7-VH4-L8-VH3-L9-CL-L10-CH1; VH3-L6-VH4-L7-VL4-L8-VL3-L9-CL-L10-CH1; VL3-VL4-VH4-VH3-CH1-Fc; VH3-VH4-VL4-VL3-CH1-Fc; VL3-VL4-VH4-VH3-CL-Fc; VH3-VH4-VL4-VL3-CL-Fc; VL3-VL4-VH4-VH3-CH1-CL-Fc; VH3-VH4-VL4-VL3-CH1-CL-Fc; VL3-VL4-VH4-VH3-CL-CH1-Fc; VH3-VH4-VL4-VL3-CL-CH1-Fc; VL3-L6-VL4-L7-VH4-L8-VH3-L9-CH1-Fc; VH3-L6-VH4-L7-VL4-L8-VL3-L9-CH1-Fc; VL3-L6-VL4-L7-VH4-L8-VH3-L9-CL-Fc; VH3-L6-VH4-L7-VL4-L8-VL3-L9-CL-Fc; VL3-L6-VL4-L7-VH4-L8-VH3-L9-CH1-L10-CL-Fc; VH3-L6-VH4-L7-VL4-L8-VL3-L9-CH1-L10-CL-Fe; VL3-L6-VL4-L7-VH4-L8-VH3-L9-CL-L10-CH1-Fc; or VH3-L6-VH4-L7-VL4-L8-VL3-L9-CL-L10-CH1-Fe; wherein VL1 is a first immunoglobulin light chain variable region that specifically binds to human CD3, CD19, CD28, CD38 or Her2; VL2 is a second immunoglobulin light chain variable region that specifically binds to human CD3, CD19, CD28, CD38 or Her2; VL3 is a third immunoglobulin light chain variable region that specifically binds to human CD3, CD19, CD28, CD38 or Her2; VL4 is a fourth immunoglobulin light chain variable region that specifically binds to human CD3, CD19, CD28, CD38 or Her2; VH1 is a first immunoglobulin heavy chain variable region that specifically binds to A2AR, APRIL, ATPDase, BAFF, BAFFR, BCMA, BlyS, BTK, BTLA, B7DC, B7H1, B7H2, B7H3, B7H4, B7H5, B7H6, B7H7, B7RP1, B7-4, C3, C5, CCL2, CCL3, CCL4, CCL5, CCL7, CCL8, CCL11, CCL15, CCL17, CCL19, CCL20, CCL21, CCL25 CCR3, CCR4, CD3, CD16A, CD19, CD20, CD24, CD27, CD28, CD30, CD38, CD39, CD40, CD40L, CD47, CD52, CD70, CD80, CD86, CD123, CD133, CD137, CD137L, CD160, CD272, CEACAM5, CLEC9, CLEC91, CRTH2, CSF-1, CSF-2, CSF-3, CXCL1, CXCL2, CXCL4, CXCL12, CXCL13, CXCR3, cMet, CTLA4, DLL3, DLL4, DNGR-1, E-cadherin, EGFR, ENTPD1, EpCAM, FCER1, FCER1A, FCER2, FGFR, FLAP, FOLH1, Gi24, GITR, GITRL, GPR5, GP100, GPRC5D, HER2, HER3, ICOSL, ICOS, HHLA2, HMGB1, HVEM, IDO, IFNa, IgE, IGF1R, IL2Rbeta, IL1, ILIA, IL1B, IL1F10, IL2, IL4, IL4Ra, IL5, IL5R, IL6, IL7, IL7Ra, IL9, IL9R, IL10, rhIL1O, IL12, IL13, IL13Ra1, IL13Ra2, IL15, IL17, IL17Rb, IL18, IL22, IL23, IL25, IL7, IL33, IL35, ITGB4, ITK, KIR, LAG3, LAMP1, leptin, LPFS2, MHC class II, MUC-1, MUC-16, NCR3LG1, NKG2D, NKp46, NTPDase-1, OX40, OX40L, PD-1, PD-L1, PD-L2, PROM1, S152, SIRPalpha, SISP1, SLC, SPG64, ST2, STEAP1, STEAP2, Syk kinase, STEAP1, TROP2, TACI, TDO, TGFBETA, T14, TIGIT, TIM3, TLR, TLR2, TLR4, TLR5, TLR9, TMEF1, TNFa, TNFRSF7, Tp55, TREM1, TSLP, TSLPR, TWEAK, VEGF, VISTA, Vstm3, or WUCAM; VH2 is a second immunoglobulin heavy chain variable region that specifically binds to A2AR, APRIL, ATPDase, BAFF, BAFFR, BCMA, BlyS, BTK, BTLA, B7DC, B7H1, B7H2, B7H3, B7H4, B7H5, B7H6, B7H7, B7RP1, B7-4, C3, C5, CCL2, CCL3, CCL4, CCL5, CCL7, CCL8, CCL11, CCL15, CCL17, CCL19, CCL20, CCL21, CCL25 CCR3, CCR4, CD3, CD16A, CD19, CD20, CD24, CD27, CD28, CD30, CD38, CD39, CD40, CD40L, CD47, CD52, CD70, CD80, CD86, CD123, CD133, CD137, CD137L, CD160, CD272, CEACAM5, CLEC9, CLEC91, CRTH2, CSF-1, CSF-2, CSF-3, CXCL1, CXCL2, CXCL4, CXCL12, CXCL13, CXCR3, cMet, CTLA4, DLL3, DLL4, DNGR-1, E-cadherin, EGFR, ENTPD1, EpCAM, FCER1, FCER1A, FCER2, FGFR, FLAP, FOLH1, Gi24, GITR, GITRL, GPR5, GP100, GPRC5D, HER2, HER3, ICOSL, ICOS, HHLA2, HMGB1, HVEM, IDO, IFNa, IgE, IGF1R, IL2Rbeta, IL1, ILIA, IL1B, IL1F10, IL2, IL4, IL4Ra, IL5, IL5R, IL6, IL7, IL7Ra, IL8, IL9, IL9R, IL10, rhIL1O, IL12, IL13, IL13Ra1, IL13Ra2, IL15, IL17, IL17Rb, IL18, IL22, IL23, IL25, IL7, IL33, IL35, ITGB4, ITK, KIR, LAG3, LAMP1, leptin, LPFS2, MHC class II, MUC-1, MUC-16, NCR3LG1, NKG2D, NKp46, NTPDase-1, OX40, OX40L, PD-1, PD-L1, PD-L2, PROM1, S152, SIRPalpha, SISP1, SLC, SPG64, ST2, STEAP1, STEAP2, Syk kinase, STEAP1, TROP2, TACI, TDO, TGFBETA, T14, TIGIT, TIM3, TLR, TLR2, TLR4, TLR5, TLR9, TMEF1, TNFa, TNFRSF7, Tp55, TREM1, TSLP, TSLPR, TWEAK, VEGF, VISTA, Vstm3, or WUCAM; VH3 is a third immunoglobulin heavy chain variable region that specifically binds to A2AR, APRIL, ATPDase, BAFF, BAFFR, BCMA, BlyS, BTK, BTLA, B7DC, B7H1, B7H2, B7H3, B7H4, B7H5, B7H6, B7H7, B7RP1, B7-4, C3, C5, CCL2, CCL3, CCL4, CCL5, CCL7, CCL8, CCL11, CCL15, CCL17, CCL19, CCL20, CCL21, CCL25 CCR3, CCR4, CD3, CD16A, CD19, CD20, CD24, CD27, CD28, CD30, CD38, CD39, CD40, CD40L, CD47, CD52, CD70, CD80, CD86, CD123, CD133, CD137, CD137L, CD160, CD272, CEACAM5, CLEC9, CLEC91, CRTH2, CSF-1, CSF-2, CSF-3, CXCL1, CXCL2, CXCL4, CXCL12, CXCL13, CXCR3, cMet, CTLA4, DLL3, DLL4, DNGR-1, E-cadherin, EGFR, ENTPD1, EpCAM, FCER1, FCER1A, FCER2, FGFR, FLAP, FOLH1, Gi24, GITR, GITRL, GPR5, GP100, GPRC5D, HER2, HER3, ICOSL, ICOS, HHLA2, HMGB1, HVEM, IDO, IFNa, IgE, IGF1R, IL2Rbeta, IL1, ILIA, IL1B, IL1F10, IL2, IL4, IL4Ra, IL5, IL5R, IL6, IL7, IL7Ra, IL9, IL9R, IL10, rhIL1O, IL12, IL13, IL13Ra1, IL13Ra2, IL15, IL17, IL17Rb, IL18, IL22, IL23, IL25, IL7, IL33, IL35, ITGB4, ITK, KIR, LAG3, LAMP1, leptin, LPFS2, MHC class II, MUC-1, MUC-16, NCR3LG1, NKG2D, NKp46, NTPDase-1, OX40, OX40L, PD-1, PD-L1, PD-L2, PROM1, S152, SIRPalpha, SISP1, SLC, SPG64, ST2, STEAP1, STEAP2, Syk kinase, STEAP1, TROP2, TACI, TDO, TGFBETA, T14, TIGIT, TIM3, TLR, TLR2, TLR4, TLR5, TLR9, TMEF1, TNFa, TNFRSF7, Tp55, TREM1, TSLP, TSLPR, TWEAK, VEGF, VISTA, Vstm3, or WUCAM; VH4 is a fourth immunoglobulin heavy chain variable region that specifically binds to A2AR, APRIL, ATPDase, BAFF, BAFFR, BCMA, BlyS, BTK, BTLA, B7DC, B7H1, B7H2, B7H3, B7H4, B7H5, B7H6, B7H7, B7RP1, B7-4, C3, C5, CCL2, CCL3, CCL4, CCL5, CCL7, CCL8, CCL11, CCL15, CCL17, CCL19, CCL20, CCL21, CCL25 CCR3, CCR4, CD3, CD16A, CD19, CD20, CD24, CD27, CD28, CD30, CD38, CD39, CD40, CD40L, CD47, CD52, CD70, CD80, CD86, CD123, CD133, CD137, CD137L, CD160, CD272, CEACAM5, CLEC9, CLEC91, CRTH2, CSF-1, CSF-2, CSF-3, CXCL1, CXCL2, CXCL4, CXCL12, CXCL13, CXCR3, cMet, CTLA4, DLL3, DLL4, DNGR-1, E-cadherin, EGFR, ENTPD1, EpCAM, FCER1, FCER1A, FCER2, FGFR, FLAP, FOLH1, Gi24, GITR, GITRL, GPR5, GP100, GPRC5D, HER2, HER3, ICOSL, ICOS, HHLA2, HMGB1, HVEM, IDO, IFNa, IgE, IGF1R, IL2Rbeta, IL1, ILIA, IL1B, IL1F10, IL2, IL4, IL4Ra, IL5, IL5R, IL6, IL7, IL7Ra, IL8, IL9, IL9R, IL10, rhIL1O, IL12, IL13, IL13Ra1, IL13Ra2, IL15, IL17, IL17Rb, IL18, IL22, IL23, IL25, IL7, IL33, IL35, ITGB4, ITK, KIR, LAG3, LAMP1, leptin, LPFS2, MHC class II, MUC-1, MUC-16, NCR3LG1, NKG2D, NKp46, NTPDase-1, OX40, OX40L, PD-1, PD-L1, PD-L2, PROM1, S152, SIRPalpha, SISP1, SLC, SPG64, ST2, STEAP1, STEAP2, Syk kinase, STEAP1, TROP2, TACI, TDO, TGFBETA, T14, TIGIT, TIM3, TLR, TLR2, TLR4, TLR5, TLR9, TMEF1, TNFa, TNFRSF7, Tp55, TREM1, TSLP, TSLPR, TWEAK, VEGF, VISTA, Vstm3, or WUCAM; Fc is a region comprising an immunoglobulin heavy chain constant region 2 (CH2), an immunoglobulin heavy chain constant region 3 (CH3), and optionally, an immunoglobulin hinge; CH1 is an immunoglobulin heavy chain constant region 1; CL is an immunoglobulin light chain constant region; and L1, L2, L3, L4, L5, L6, L7, L8, L9 and L10 are amino acid linkers. In some aspects, the first polypeptide has a structure represented by VL1-VL2-VH2-VH1, and the second polypeptide has a structure represented by VL3-VL4-VH4-VH3; VH3-VH4-VL4-VL3; VL3-L4-VL4-L5-VH4-L6-VH3; VH3-L4-VH4-L5-VL4-L6-VL3; VL3-VL4-VH4-VH3-Fc; VH3-VH4-VL4-VL3-Fc; VL3-L5-VL4-L6-VH4-L7-VH3-Fc; VH3-L5-VH4-L6-VL4-L7-VL3-Fc; VL3-L5-VL4-L6-VH4-L7-VH3-L8-Fc; VH3-L5-VH4-L6-VL4-L7-VL3-L8-Fc; VL3-VL4-VH4-VH3-CH1; VH3-VH4-VL4-VL3-CH1; VL3-VL4-VH4-VH3-CL; VH3-VH4-VL4-VL3-CL; VL3-VL4-VH4-VH3-CH1-CL; VH3-VH4-VL4-VL3-CH1-CL; VL3-VL4-VH4-VH3-CL-CH1; VH3-VH4-VL4-VL3-CL-CH1; VL3-L6-VL4-L7-VH4-L8-VH3-L9-CH1; VH3-L6-VH4-L7-VL4-L8-VL3-L9-CH1; VL3-L6-VL4-L7-VH4-L8-VH3-L9-CL; VH3-L6-VH4-L7-VL4- L8-VL3-L9-CL; VL3-L6-VL4-L7-VH4-L8-VH3-L9-CH1-L10-CL; VH3-L6-VH4-L7-VL4-L8-VL3-L9-CH1-L10-CL; VL3-L6-VL4-L7-VH4-L8-VH3-L9-CL-L10-CH1; VH3-L6-VH4-L7-VL4-L8-VL3-L9-CL-L10-CH1; VL3-VL4-VH4-VH3-CH1-Fc; VH3-VH4-VL4-VL3-CH1-Fc; VL3-VL4-VH4-VH3-CL-Fc; VH3-VH4-VL4-VL3-CL-Fc; VL3-VL4-VH4-VH3-CH1-CL-Fc; VH3-VH4-VL4-VL3-CH1-CL-Fc; VL3-VL4-VH4-VH3-CL-CH1-Fc; VH3-VH4-VL4-VL3-CL-CH1-Fc; VL3-L6-VL4-L7-VH4-L8-VH3-L9-CH1-Fc; VH3-L6-VH4-L7-VL4-L8-VL3-L9-CH1-Fc; VL3-L6-VL4-L7-VH4-L8-VH3-L9-CL-Fc; VH3-L6-VH4-L7-VL4-L8-VL3-L9-CL-Fc; VL3-L6-VL4-L7-VH4-L8-VH3-L9-CH1-L10-CL-Fc; VH3-L6-VH4-L7-VL4-L8-VL3-L9-CH1-L10-CL-Fc; VL3-L6-VL4-L7-VH4-L8-VH3-L9-CL-L10-CH1-Fc; or VH3-L6-VH4-L7-VL4-L8-VL3-L9-CL-L10-CH1-Fc. In some aspects, the first polypeptide has a structure represented by VH1-VH2-VL2-VL1, and the second polypeptide has a structure represented by VL3-VL4-VH4-VH3; VH3-VH4-VL4-VL3; VL3-L4-VL4-L5-VH4-L6-VH3; VH3-L4-VH4-L5-VL4-L6-VL3; VL3-VL4-VH4-VH3-Fc; VH3-VH4-VL4-VL3-Fe; VL3-L5-VL4-L6-VH4-L7-VH3-Fc; VH3-L5-VH4-L6-VL4-L7-VL3-Fc; VL3-L5-VL4-L6-VH4-L7-VH3-L8-Fc; VH3-L5-VH4-L6-VL4-L7-VL3-L8-Fc; VL3-VL4-VH4-VH3-CH1; VH3-VH4-VL4-VL3-CH1; VL3-VL4-VH4-VH3-CL; VH3-VH4-VL4-VL3-CL; VL3-VL4-VH4-VH3-CH1-CL; VH3-VH4-VL4-VL3-CH1-CL; VL3-VL4-VH4-VH3-CL-CH1; VH3-VH4-VL4-VL3-CL-CH1; VL3-L6-VL4-L7-VH4-L8-VH3-L9-CH1; VH3-L6-VH4-L7-VL4-L8-VL3-L9-CH1; VL3-L6-VL4-L7-VH4-L8-VH3-L9-CL; VH3-L6-VH4-L7-VL4-L8-VL3-L9-CL; VL3-L6-VL4- L7-VH4-L8-VH3-L9-CH1-L10-CL; VH3-L6-VH4-L7-VL4-L8-VL3-L9-CH1-L10-CL; VL3-L6-VL4-L7-VH4-L8-VH3-L9-CL-L10-CH1; VH3-L6-VH4-L7-VL4-L8-VL3-L9-CL-L10-CH1; VL3-VL4-VH4-VH3-CH1-Fe; VH3-VH4-VL4-VL3-CH1-Fc; VL3-VL4-VH4-VH3-CL-Fc; VH3-VH4-VL4-VL3-CL-Fc; VL3-VL4-VH4-VH3-CH1-CL-Fc; VH3-VH4-VL4-VL3-CH1-CL-Fc; VL3-VL4-VH4-VH3-CL-CH1-Fc; VH3-VH4-VL4-VL3-CL-CH1-Fc; VL3-L6-VL4-L7-VH4-L8-VH3-L9-CH1-Fc; VH3-L6-VH4-L7-VL4-L8-VL3-L9-CH1-Fc; VL3-L6-VL4-L7-VH4-L8-VH3-L9-CL-Fc; VH3-L6-VH4-L7-VL4-L8-VL3-L9-CL-Fc; VL3-L6-VL4-L7-VH4-L8-VH3-L9-CH1-L10-CL-Fc; VH3-L6-VH4-L7-VL4-L8-VL3-L9-CH1-L10-CL-Fc; VL3-L6-VL4-L7-VH4-L8-VH3-L9-CL-L10-CH1-Fc; or VH3-L6-VH4-L7-VL4-L8-VL3-L9-CL-L10-CH1-Fc. In some aspects, the first polypeptide has a structure represented by VL1-L1-VL2-L2-VH2-L3-VH1, and the second polypeptide has a structure represented by VL3-VL4-VH4-VH3; VH3-VH4-VL4-VL3; VL3-L4-VL4-L5-VH4-L6-VH3; VH3-L4-VH4-L5-VL4-L6-VL3; VL3-VL4-VH4-VH3-Fc; VH3-VH4-VL4-VL3-Fc; VL3-L5-VL4-L6-VH4-L7-VH3-Fc; VH3-L5-VH4-L6-VL4-L7-VL3-Fc; VL3-L5-VL4-L6-VH4-L7-VH3-L8-Fc; VH3-L5-VH4-L6-VL4-L7-VL3-L8-Fc; VL3-VL4-VH4-VH3-CH1; VH3-VH4-VL4-VL3-CH1; VL3-VL4-VH4-VH3-CL; VH3-VH4-VL4-VL3-CL; VL3-VL4-VH4-VH3-CH1-CL; VH3-VH4-VL4-VL3-CH1-CL; VL3-VL4-VH4-VH3-CL-CH1; VH3-VH4-VL4-VL3-CL-CH1; VL3-L6-VL4-L7-VH4-L8-VH3-L9-CH1; VH3-L6-VH4-L7-VL4-L8-VL3-L9-CH1; VL3-L6-VL4-L7-VH4-L8-VH3-L9-CL; VH3-L6-VH4-L7-VL4-L8-VL3-L9-CL; VL3-L6-VL4-L7-VH4-L8- VH3-L9-CH1-L10-CL; VH3-L6-VH4-L7-VL4-L8-VL3-L9-CH1-L10-CL; VL3-L6-VL4-L7-VH4-L8-VH3-L9-CL-L10-CH1; VH3-L6-VH4-L7-VL4-L8-VL3-L9-CL-L10-CH1; VL3-VL4-VH4-VH3-CH1-Fc; VH3-VH4-VL4-VL3-CH1-Fc; VL3-VL4-VH4-VH3-CL-Fc; VH3-VH4-VL4-VL3-CL-Fc; VL3-VL4-VH4-VH3-CH1-CL-Fc; VH3-VH4-VL4-VL3-CH1-CL-Fc; VL3-VL4-VH4-VH3-CL-CH1-Fc; VH3-VH4-VL4-VL3-CL-CH1-Fc; VL3-L6-VL4-L7-VH4-L8-VH3-L9-CH1-Fc; VH3-L6-VH4-L7-VL4-L8-VL3-L9-CH1-Fc; VL3-L6-VL4-L7-VH4-L8-VH3-L9-CL-Fc; VH3-L6-VH4-L7-VL4-L8-VL3-L9-CL-Fc; VL3-L6-VL4-L7-VH4-L8-VH3-L9-CH1-L10-CL-Fc; VH3-L6-VH4-L7-VL4-L8-VL3-L9-CH1-L10-CL-Fc; VL3-L6-VL4-L7-VH4-L8-VH3-L9-CL-L10-CH1-Fc; or VH3-L6-VH4-L7-VL4-L8-VL3-L9-CL-L10-CH1-Fc. In some aspects, the first polypeptide has a structure represented by VH1-L1-VH2-L2-VL2-L3-VL1, and the second polypeptide has a structure represented by VL3-VL4-VH4-VH3; VH3-VH4-VL4-VL3; VL3-L4-VL4-L5-VH4-L6-VH3; VH3-L4-VH4-L5-VL4-L6-VL3; VL3-VL4-VH4-VH3-Fc; VH3-VH4-VL4-VL3-Fc; VL3-L5-VL4-L6-VH4-L7-VH3-Fc; VH3-L5-VH4-L6-VL4-L7-VL3-Fc; VL3-L5-VL4-L6-VH4-L7-VH3-L8-Fc; VH3-L5-VH4-L6-VL4-L7-VL3-L8-Fc; VL3-VL4-VH4-VH3-CH1; VH3-VH4-VL4-VL3-CH1; VL3-VL4-VH4-VH3-CL; VH3-VH4-VL4-VL3-CL; VL3-VL4-VH4-VH3-CH1-CL; VH3-VH4-VL4-VL3-CH1-CL; VL3-VL4-VH4-VH3-CL-CH1; VH3-VH4-VL4-VL3-CL-CH1; VL3-L6-VL4-L7-VH4-L8-VH3-L9-CH1; VH3-L6-VH4-L7-VL4-L8-VL3-L9-CH1; VL3-L6-VL4-L7-VH4-L8-VH3-L9-CL; VH3-L6-VH4-L7-VL4-L8-VL3-L9-CL; VL3-L6-VL4-L7-VH4-L8-VH3-L9-CH1-L10-CL; VH3-L6-VH4-L7-VL4-L8-VL3-L9-CH1-L10-CL; VL3-L6-VL4-L7-VH4-L8-VH3-L9-CL-L10-CH1; VH3-L6-VH4-L7-VL4-L8-VL3-L9-CL-L10-CH1; VL3-VL4-VH4-VH3-CH1-Fc; VH3-VH4-VL4-VL3-CH1-Fc; VL3-VL4-VH4-VH3-CL-Fc; VH3-VH4-VL4-VL3-CL-Fc; VL3-VL4-VH4-VH3-CH1-CL-Fc; VH3-VH4-VL4-VL3-CH1-CL-Fc; VL3-VL4-VH4-VH3-CL-CH1-Fc; VH3-VH4-VL4-VL3-CL-CH1-Fc; VL3-L6-VL4-L7-VH4-L8-VH3-L9-CH1-Fc; VH3-L6-VH4-L7-VL4-L8-VL3-L9-CH1-Fc; VL3-L6-VL4-L7-VH4-L8-VH3-L9-CL-Fc; VH3-L6-VH4-L7-VL4-L8-VL3-L9-CL-Fc; VL3-L6-VL4-L7-VH4-L8-VH3-L9-CH1-L10-CL-Fc; VH3-L6-VH4-L7-VL4-L8-VL3-L9-CH1-L10-CL-Fc; VL3-L6-VL4-L7-VH4-L8-VH3-L9-CL-L10-CH1-Fc; or VH3-L6-VH4-L7-VL4-L8-VL3-L9-CL-L10-CH1-F c. In some aspects, the first polypeptide has a structure represented by VL1-VL2-VH2-VH1-Fc, and the second polypeptide has a structure represented by VL3-VL4-VH4-VH3; VH3-VH4-VL4-VL3; VL3-L4-VL4-L5-VH4-L6-VH3; VH3-L4-VH4-L5-VL4-L6-VL3; VL3-VL4-VH4-VH3-Fc; VH3-VH4-VL4-VL3-Fc; VL3-L5-VL4-L6-VH4-L7-VH3-Fc; VH3-L5-VH4-L6-VL4-L7-VL3-Fc; VL3-L5-VL4-L6-VH4-L7-VH3-L8-Fc; VH3-L5-VH4-L6-VL4-L7-VL3-L8-Fc; VL3-VL4-VH4-VH3-CH1; VH3-VH4-VL4-VL3-CH1; VL3-VL4-VH4-VH3-CL; VH3-VH4-VL4-VL3-CL; VL3-VL4-VH4-VH3-CH1-CL; VH3-VH4-VL4-VL3-CH1-CL; VL3-VL4-VH4-VH3-CL-CH1; VH3-VH4-VL4-VL3-CL-CH1; VL3-L6-VL4-L7-VH4-L8-VH3-L9-CH1; VH3-L6-VH4-L7-VL4-L8-VL3-L9-CH1; VL3-L6-VL4-L7-VH4-L8-VH3-L9-CL; VH3-L6- VH4-L7-VL4-L8-VL3-L9-CL; VL3-L6-VL4-L7-VH4-L8-VH3-L9-CH1-L10-CL; VH3-L6-VH4-L7-VL4-L8-VL3-L9-CH1- L10-CL; VL3-L6-VL4-L7-VH4-L8-VH3-L9-CL-L10-CH1; VH3-L6-VH4-L7-VL4-L8-VL3-L9-CL-L10-CH1; VL3-VL4-VH4-VH3-CH1-Fc; VH3-VH4-VL4-VL3-CH1-Fc; VL3-VL4-VH4-VH3-CL-Fc; VH3-VH4-VL4-VL3-CL-Fc; VL3-VL4-VH4-VH3-CH1-CL-Fc; VH3-VH4-VL4-VL3-CH1-CL-Fc; VL3-VL4-VH4-VH3-CL-CH1-Fc; VH3-VH4-VL4-VL3-CL-CH1-Fc; VL3-L6-VL4-L7-VH4-L8-VH3-L9-CH1-Fc; VH3-L6-VH4-L7-VL4-L8-VL3-L9-CH1-Fc; VL3-L6-VL4-L7-VH4-L8-VH3-L9-CL-Fc; VH3-L6-VH4-L7-VL4-L8-VL3-L9-CL-Fc; VL3-L6-VL4-L7-VH4-L8-VH3-L9-CH1-L10-CL-Fc; VH3-L6-VH4-L7-VL4-L8-VL3-L9-CH1-L10-CL-Fc; VL3-L6-VL4-L7-VH4-L8-VH3-L9-CL-L10-CH1-Fc; or VH3-L6-VH4-L7-VL4-L8-VL3-L9-CL-L10-CH1-Fc. In some aspects, the first polypeptide has a structure represented by VH1-VH2-VL2-VL1-Fc, and the second polypeptide has a structure represented by VL3-VL4-VH4-VH3; VH3-VH4-VL4-VL3; VL3-L4-VL4-L5-VH4-L6-VH3; VH3-L4-VH4-L5-VL4-L6-VL3; VL3-VL4-VH4-VH3- Fc; VH3-VH4-VL4-VL3-Fc; VL3-L5-VL4-L6-VH4-L7-VH3-Fc; VH3-L5-VH4-L6-VL4-L7-VL3-Fc; VL3-L5-VL4-L6-VH4-L7-VH3-L8-Fc; VH3-L5-VH4-L6-VL4-L7-VL3-L8-Fc; VL3-VL4-VH4-VH3-CH1; VH3-VH4-VL4-VL3-CH1; VL3-VL4-VH4-VH3-CL; VH3-VH4-VL4-VL3-CL; VL3-VL4-VH4-VH3-CH1-CL; VH3-VH4-VL4-VL3-CH1-CL; VL3-VL4-VH4-VH3-CL-CH1; VH3-VH4-VL4-VL3-CL-CH1; VL3-L6-VL4-L7-VH4-L8-VH3-L9-CH1; VH3-L6-VH4-L7-VL4-L8-VL3-L9-CH1; VL3-L6-VL4-L7-VH4-L8-VH3-L9-CL; VH3-L6-VH4-L7-VL4-L8-VL3-L9-CL; VL3-L6-VL4-L7-VH4-L8-VH3-L9-CH1-L10-CL; VH3-L6-VH4-L7-VL4-L8-VL3-L9-CH1-L10-CL; VL3-L6-VL4-L7- VH4-L8-VH3-L9-CL-L10-CH1; VH3-L6-VH4-L7-VL4-L8-VL3-L9-CL-L10-CH1; VL3-VL4-VH4-VH3-CH1-Fc; VH3-VH4-VL4-VL3-CH1-Fc; VL3-VL4-VH4-VH3-CL-Fc; VH3-VH4-VL4-VL3-CL-Fc; VL3-VL4-VH4-VH3-CH1-CL-Fc; VH3-VH4-VL4-VL3-CH1-CL-Fc; VL3-VL4-VH4-VH3-CL-CH1-Fc; VH3-VH4-VL4-VL3-CL-CH1-Fc; VL3-L6-VL4-L7-VH4-L8-VH3-L9-CH1-Fc; VH3-L6-VH4-L7-VL4-L8-VL3-L9-CH1-Fc; VL3-L6-VL4-L7-VH4-L8-VH3-L9- CL-Fc; VH3-L6-VH4-L7-VL4-L8-VL3-L9-CL-Fc; VL3-L6-VL4-L7-VH4-L8-VH3-L9-CH1-L10-CL-Fc; VH3-L6-VH4-L7-VL4-L8-VL3-L9-CH1-L10-CL-Fc; VL3-L6-VL4-L7-VH4-L8-VH3-L9-CL-L10-CH1-Fc; or VH3-L6-VH4-L7-VL4-L8-VL3-L9-CL-L10-CH1-Fc. In some aspects, the first polypeptide has a structure represented by VL1-L1-VL2-L2-VH2-L3-VH1-Fc, and the second polypeptide has a structure represented by VL3-VL4-VH4-VH3; VH3-VH4-VL4-VL3; VL3-L4-VL4-L5-VH4-L6-VH3; VH3-L4-VH4-L5-VL4-L6-VL3; VL3-VL4-VH4-VH3-Fc; VH3-VH4-VL4-VL3-Fc; VL3-L5-VL4-L6-VH4-L7-VH3-Fc; VH3-L5-VH4-L6-VL4-L7-VL3-Fc; VL3-L5-VL4-L6-VH4-L7-VH3-L8-Fc; VH3-L5-VH4-L6-VL4-L7-VL3-L8-Fc; VL3-VL4-VH4-VH3-CH1; VH3-VH4-VL4-VL3-CH1; VL3-VL4-VH4-VH3-CL; VH3-VH4-VL4-VL3-CL; VL3-VL4-VH4-VH3-CH1-CL; VH3-VH4-VL4-VL3-CH1-CL; VL3-VL4-VH4-VH3-CL-CH1; VH3-VH4-VL4-VL3-CL-CH1; VL3-L6-VL4-L7-VH4-L8-VH3-L9-CH1; VH3-L6-VH4-L7-VL4-L8-VL3-L9-CH1; VL3-L6-VL4-L7-VH4-L8-VH3-L9-CL; VH3-L6-VH4-L7-VL4-L8-VL3-L9-CL; VL3-L6-VL4-L7-VH4- L8-VH3-L9-CH1-L10-CL; VH3-L6-VH4-L7-VL4-L8-VL3-L9-CH1-L10-CL; VL3-L6-VL4-L7-VH4-L8-VH3-L9-CL-L10-CH1; VH3-L6-VH4-L7-VL4-L8-VL3-L9-CL-L10-CH1; VL3-VL4-VH4-VH3-CH1-Fc; VH3-VH4-VL4-VL3-CH1-Fc; VL3-VL4-VH4-VH3-CL-Fc; VH3-VH4-VL4-VL3-CL-Fc; VL3-VL4-VH4-VH3-CH1-CL-Fc; VH3-VH4-VL4-VL3-CH1-CL-Fc; VL3-VL4-VH4-VH3-CL-CH1-Fc; VH3-VH4-VL4-VL3-CL-CH1-Fc; VL3-L6-VL4-L7-VH4-L8-VH3-L9-CH1-Fc; VH3-L6-VH4-L7-VL4-L8-VL3-L9-CH1-Fc; VL3-L6-VL4-L7-VH4-L8-VH3-L9-CL-Fc; VH3-L6-VH4-L7-VL4-L8-VL3-L9-CL-Fc; VL3-L6-VL4-L7-VH4-L8-VH3-L9-CH1-L10-CL-Fc; VH3-L6-VH4-L7-VL4-L8-VL3-L9-CH1-L10-CL-Fc; VL3-L6-VL4-L7-VH4-L8-VH3-L9-CL-L10-CH1-Fc; or VH3-L6-VH4-L7-VL4-L8-VL3-L9-CL-L10-CH1-Fc. In some aspects, the first polypeptide has a structure represented by VH1-L1-VH2-L2-VL2-L3-VL1-Fc, and the second polypeptide has a structure represented by VL3-VL4-VH4-VH3; VH3-VH4-VL4-VL3; VL3-L4-VL4-L5-VH4-L6-VH3; VH3-L4-VH4-L5-VL4-L6-VL3; VL3-VL4-VH4-VH3-Fc; VH3-VH4-VL4-VL3-Fc; VL3-L5-VL4-L6-VH4-L7-VH3-Fc; VH3-L5-VH4-L6-VL4-L7-VL3-Fc; VL3-L5-VL4-L6-VH4-L7-VH3-L8-Fc; VH3-L5-VH4-L6-VL4-L7-VL3-L8-Fc; VL3-VL4-VH4-VH3-CH1; VH3-VH4-VL4-VL3-CH1; VL3-VL4-VH4-VH3-CL; VH3-VH4-VL4-VL3-CL; VL3-VL4-VH4-VH3-CH1-CL; VH3-VH4-VL4-VL3-CH1-CL; VL3-VL4-VH4-VH3-CL-CH1; VH3-VH4-VL4-VL3-CL-CH1; VL3-L6-VL4-L7-VH4-L8-VH3-L9-CH1; VH3-L6-VH4-L7-VL4-L8-VL3-L9-CH1; VL3-L6- VL4-L7-VH4-L8-VH3-L9-CL; VH3-L6-VH4-L7-VL4-L8-VL3-L9-CL; VL3-L6-VL4-L7-VH4-L8-VH3-L9-CH1-L10- CL; VH3-L6-VH4-L7-VL4-L8-VL3-L9-CH1-L10-CL; VL3-L6-VL4-L7-VH4-L8-VH3-L9-CL-L10-CH1; VH3-L6-VH4-L7-VL4-L8-VL3-L9-CL-L10-CH1; VL3-VL4-VH4-VH3-CH1-Fc; VH3-VH4-VL4-VL3-CH1-Fc; VL3-VL4-VH4-VH3-CL-Fc; VH3-VH4-VL4-VL3-CL-Fc; VL3-VL4-VH4-VH3-CH1-CL-Fc; VH3-VH4-VL4-VL3-CH1-CL-Fc; VL3-VL4-VH4-VH3-CL-CH1-Fc; VH3-VH4-VL4-VL3-CL-CH1-Fc; VL3-L6-VL4-L7-VH4-L8-VH3-L9-CH1-Fc; VH3-L6-VH4-L7-VL4-L8-VL3-L9-CH1-Fc; VL3-L6-VL4-L7-VH4-L8-VH3-L9-CL-Fc; VH3-L6-VH4-L7-VL4-L8-VL3-L9-CL-Fc; VL3-L6-VL4-L7-VH4-L8-VH3-L9-CH1-L10-CL-Fc; VH3-L6-VH4-L7-VL4-L8-VL3-L9-CH1-L10-CL-Fc; VL3-L6-VL4-L7-VH4-L8-VH3-L9-CL-L10-CH1-Fc; or VH3-L6-VH4-L7-VL4-L8-VL3-L9-CL-L10-CH1-Fc. In some aspects, the first polypeptide has a structure represented by VL1-L1-VL2-L2-VH2-L3-VH1-L4-Fc, and the second polypeptide has a structure represented by VL3-VL4-VH4-VH3; VH3-VH4-VL4-VL3; VL3-L4-VL4-L5-VH4-L6-VH3; VH3-L4-VH4-L5-VL4-L6-VL3; VL3-VL4-VH4-VH3-Fc; VH3-VH4-VL4-VL3-Fc; VL3-L5-VL4-L6-VH4-L7-VH3-Fc; VH3-L5-VH4-L6-VL4-L7-VL3-Fc; VL3-L5-VL4-L6-VH4-L7-VH3-L8-Fc; VH3-L5-VH4-L6-VL4-L7-VL3-L8-Fc; VL3-VL4-VH4-VH3-CH1; VH3-VH4-VL4-VL3-CH1; VL3-VL4-VH4-VH3-CL; VH3-VH4-VL4-VL3-CL; VL3-VL4-VH4-VH3-CH1-CL; VH3-VH4-VL4-VL3-CH1-CL; VL3-VL4-VH4-VH3-CL-CH1; VH3-VH4-VL4-VL3-CL-CH1; VL3-L6-VL4-L7-VH4-L8-VH3-L9-CH1; VH3-L6-VH4-L7-VL4-L8-VL3-L9-CH1; VL3-L6-VL4-L7-VH4-L8-VH3-L9-CL; VH3-L6-VH4-L7-VL4-L8-VL3-L9-CL; VL3-L6-VL4-L7-VH4-L8-VH3-L9-CH1-L10-CL; VH3-L6-VH4-L7-VL4-L8-VL3-L9-CH1-L10-CL; VL3-L6-VL4-L7-VH4-L8-VH3-L9-CL-L10-CH1; VH3-L6-VH4-L7-VL4-L8-VL3-L9-CL-L10-CH1; VL3-VL4-VH4-VH3-CH1-Fc; VH3-VH4-VL4-VL3-CH1-Fc; VL3-VL4-VH4-VH3-CL-Fc; VH3-VH4-VL4-VL3-CL-Fc; VL3-VL4-VH4-VH3-CH1-CL-Fc; VH3-VH4-VL4-VL3-CH1-CL-Fc; VL3-VL4-VH4-VH3-CL-CH1-Fc; VH3-VH4-VL4-VL3-CL-CH1-Fc; VL3-L6-VL4-L7-VH4-L8-VH3-L9-CH1-Fc; VH3-L6-VH4-L7-VL4-L8-VL3-L9-CH1-Fc; VL3-L6-VL4-L7-VH4-L8-VH3-L9-CL-Fc; VH3-L6-VH4-L7-VL4-L8-VL3-L9-CL-Fc; VL3-L6-VL4-L7-VH4-L8-VH3-L9-CH1-L10-CL-Fc; VH3-L6-VH4-L7-VL4-L8-VL3-L9-CH1-L10-CL-Fc; VL3-L6-VL4-L7-VH4-L8-VH3-L9-CL-L10-CH1-Fc; or VH3-L6-VH4-L7-VL4-L8-VL3-L9-CL-L10-CH1-F c. In some aspects, the first polypeptide has a structure represented by VH1-L1-VH2-L2-VL2-L3-VL1-L4-Fc, and the second polypeptide has a structure represented by VL3-VL4-VH4-VH3; VH3-VH4-VL4-VL3; VL3-L4-VL4-L5-VH4-L6-VH3; VH3-L4-VH4-L5-VL4-L6-VL3; VL3-VL4-VH4-VH3-Fc; VH3-VH4-VL4-VL3-Fc; VL3-L5-VL4-L6-VH4-L7-VH3-Fc; VH3-L5-VH4-L6-VL4-L7-VL3-Fc; VL3-L5-VL4-L6-VH4-L7-VH3-L8-Fc; VH3-L5-VH4-L6-VL4-L7-VL3-L8-Fc; VL3-VL4-VH4-VH3-CH1; VH3-VH4-VL4-VL3-CH1; VL3-VL4-VH4-VH3-CL; VH3-VH4-VL4-VL3-CL; VL3-VL4-VH4-VH3-CH1-CL; VH3-VH4-VL4-VL3-CH1-CL; VL3-VL4-VH4-VH3-CL-CH1; VH3-VH4-VL4-VL3-CL-CH1; VL3-L6-VL4-L7-VH4-L8-VH3-L9-CH1; VH3-L6-VH4-L7-VL4-L8-VL3-L9-CH1; VL3-L6-VL4-L7-VH4-L8-VH3-L9-CL; VH3-L6-VH4-L7-VL4-L8-VL3-L9-CL; VL3-L6-VL4-L7-VH4-L8-VH3-L9-CH1-L10-CL; VH3-L6-VH4-L7-VL4-L8-VL3- L9-CH1-L10-CL; VL3-L6-VL4-L7-VH4-L8-VH3-L9-CL-L10-CH1; VH3-L6-VH4-L7-VL4-L8-VL3-L9-CL-L10-CH1; VL3-VL4-VH4-VH3-CH1-Fc; VH3-VH4-VL4-VL3-CH1-Fc; VL3-VL4-VH4-VH3-CL-Fc; VH3-VH4-VL4-VL3-CL-Fc; VL3-VL4-VH4-VH3-CH1-CL-Fc; VH3-VH4-VL4-VL3-CH1-CL-Fc; VL3-VL4-VH4-VH3-CL-CH1-Fc; VH3-VH4-VL4-VL3-CL-CH1-Fc; VL3-L6-VL4-L7-VH4-L8-VH3-L9-CH1-Fc; VH3-L6-VH4-L7-VL4-L8-VL3-L9-CH1-Fc; VL3-L6-VL4-L7-VH4-L8-VH3-L9-CL-Fc; VH3-L6-VH4-L7-VL4-L8-VL3-L9-CL-Fc; VL3-L6-VL4-L7-VH4-L8-VH3-L9-CH1-L10-CL-Fc; VH3-L6-VH4-L7-VL4-L8-VL3-L9-CH1-L10-CL-Fc; VL3-L6-VL4-L7-VH4-L8-VH3-L9-CL-L10-CH1-Fc; or VH3-L6-VH4-L7-VL4-L8-VL3-L9-CL-L10-CH1-Fc. In some aspects, the first polypeptide has a structure represented by VL1-VL2-VH2-VH1-CH1, and the second polypeptide has a structure represented by VL3-VL4-VH4-VH3; VH3-VH4-VL4-VL3; VL3-L4-VL4-L5-VH4-L6-VH3; VH3-L4-VH4-L5-VL4-L6-VL3; VL3-VL4-VH4-VH3-Fc; VH3-VH4-VL4-VL3-Fc; VL3-L5-VL4-L6-VH4-L7-VH3-Fc; VH3-L5-VH4-L6-VL4-L7-VL3-Fc; VL3-L5-VL4-L6-VH4-L7-VH3-L8-Fc; VH3-L5-VH4-L6-VL4-L7-VL3-L8-Fc; VL3-VL4-VH4-VH3-CH1; VH3-VH4-VL4-VL3-CH1; VL3-VL4-VH4-VH3-CL; VH3-VH4-VL4-VL3-CL; VL3-VL4-VH4-VH3-CH1-CL; VH3-VH4-VL4-VL3-CH1-CL; VL3-VL4-VH4-VH3-CL-CH1; VH3-VH4-VL4-VL3-CL-CH1; VL3-L6-VL4-L7-VH4-L8-VH3-L9-CH1; VH3-L6-VH4-L7-VL4-L8-VL3-L9-CH1; VL3-L6-VL4-L7-VH4-L8-VH3-L9-CL; VH3-L6-VH4-L7-VL4-L8-VL3-L9-CL; VL3-L6-VL4-L7-VH4-L8-VH3-L9-CH1-L10-CL; VH3-L6-VH4-L7-VL4-L8-VL3-L9-CH1-L10-CL; VL3-L6-VL4-L7-VH4-L8-VH3-L9-CL-L10-CH1; VH3-L6-VH4-L7-VL4-L8-VL3-L9-CL-L10-CH1; VL3-VL4-VH4-VH3-CH1-Fc; VH3-VH4-VL4-VL3-CH1-Fc; VL3-VL4-VH4-VH3-CL-Fc; VH3-VH4-VL4-VL3-CL-Fc; VL3-VL4-VH4-VH3-CH1-CL-Fc; VH3-VH4-VL4-VL3-CH1-CL-Fc; VL3-VL4-VH4-VH3-CL-CH1-Fc; VH3-VH4-VL4-VL3-CL-CH1-Fc; VL3-L6-VL4-L7-VH4-L8-VH3-L9-CH1-Fc; VH3-L6-VH4-L7-VL4-L8-VL3-L9-CH1-Fe; VL3-L6-VL4-L7-VH4-L8-VH3-L9-CL-Fc; VH3-L6-VH4-L7-VL4-L8-VL3-L9-CL-Fc; VL3-L6-VL4-L7-VH4-L8-VH3-L9-CH1-L10-CL-Fc; VH3-L6-VH4-L7-VL4-L8-VL3-L9-CH1-L10-CL-Fc; VL3-L6-VL4-L7-VH4-L8-VH3-L9-CL-L10-CH1-Fc; or VH3-L6-VH4-L7-VL4-L8-VL3-L9-CL-L10-CH1-Fc. In some aspects, the first polypeptide has a structure represented by VH1-VH2-VL2-VL1-CH1, and the second polypeptide has a structure represented by VL3-VL4-VH4-VH3; VH3-VH4-VL4-VL3; VL3-L4-VL4-L5-VH4-L6-VH3; VH3-L4-VH4-L5-VL4-L6-VL3; VL3-VL4-VH4-VH3-Fc; VH3-VH4-VL4-VL3-Fc; VL3-L5-VL4-L6-VH4-L7-VH3-Fc; VH3-L5-VH4-L6-VL4-L7-VL3-Fc; VL3-L5-VL4-L6-VH4-L7-VH3-L8-Fc; VH3-L5-VH4-L6-VL4-L7-VL3-L8-Fc; VL3-VL4-VH4-VH3-CH1; VH3-VH4-VL4-VL3-CH1; VL3-VL4-VH4-VH3-CL; VH3-VH4-VL4-VL3-CL; VL3-VL4-VH4-VH3-CH1-CL; VH3-VH4-VL4-VL3-CH1-CL; VL3-VL4-VH4-VH3-CL-CH1; VH3-VH4-VL4-VL3-CL-CH1; VL3-L6-VL4-L7-VH4-L8-VH3-L9-CH1; VH3-L6-VH4-L7-VL4-L8-VL3-L9-CH1; VL3-L6-VL4-L7-VH4-L8-VH3-L9-CL; VH3-L6-VH4-L7-VL4-L8-VL3-L9-CL; VL3-L6-VL4-L7- VH4-L8-VH3-L9-CH1-L10-CL; VH3-L6-VH4-L7-VL4-L8-VL3-L9-CH1-L10-CL; VL3-L6-VL4-L7-VH4-L8-VH3-L9- CL-L10-CH1; VH3-L6-VH4-L7-VL4-L8-VL3-L9-CL-L10-CH1; VL3-VL4-VH4-VH3-CH1-Fc; VH3-VH4-VL4-VL3-CH1-Fc; VL3-VL4-VH4-VH3-CL-Fc; VH3-VH4-VL4-VL3-CL-Fc; VL3-VL4-VH4-VH3-CH1-CL-Fc; VH3-VH4-VL4-VL3-CH1-CL-Fc; VL3-VL4-VH4-VH3-CL-CH1-Fc; VH3-VH4-VL4-VL3-CL-CH1-Fc; VL3-L6-VL4-L7-VH4-L8-VH3-L9-CH1-Fc; VH3-L6-VH4-L7-VL4-L8-VL3-L9-CH1-Fc; VL3-L6-VL4-L7-VH4-L8-VH3-L9-CL-Fc; VH3-L6-VH4-L7-VL4-L8-VL3-L9-CL-Fc; VL3-L6-VL4-L7-VH4-L8-VH3-L9-CH1-L10-CL-Fc; VH3-L6-VH4-L7-VL4-L8-VL3-L9-CH1-L10-CL-Fc; VL3-L6-VL4-L7-VH4-L8-VH3-L9-CL-L10-CH1-Fc; or VH3-L6-VH4-L7-VL4-L8-VL3-L9-CL-L10-CH1-Fc. In some aspects, the first polypeptide has a structure represented by VL1-VL2-VH2-VH1-CL, and the second polypeptide has a structure represented by VL3-VL4-VH4-VH3; VH3-VH4-VL4-VL3; VL3-L4-VL4-L5-VH4-L6-VH3; VH3-L4-VH4-L5-VL4-L6-VL3; VL3-VL4-VH4-VH3-Fc; VH3-VH4-VL4-VL3-Fc; VL3-L5-VL4-L6-VH4-L7-VH3-Fc; VH3-L5-VH4-L6-VL4-L7-VL3-Fc; VL3-L5-VL4-L6-VH4-L7-VH3-L8-Fc; VH3-L5-VH4-L6-VL4-L7-VL3-L8-Fc; VL3-VL4-VH4-VH3-CH1; VH3-VH4-VL4-VL3-CH1; VL3-VL4-VH4-VH3-CL; VH3-VH4-VL4-VL3-CL; VL3-VL4-VH4-VH3-CH1-CL; VH3-VH4-VL4-VL3-CH1-CL; VL3-VL4-VH4-VH3-CL-CH1; VH3-VH4-VL4-VL3-CL-CH1; VL3-L6-VL4-L7-VH4-L8-VH3-L9-CH1; VH3-L6-VH4-L7-VL4-L8-VL3-L9-CH1; VL3-L6- VL4-L7-VH4-L8-VH3-L9-CL; VH3-L6-VH4-L7-VL4-L8-VL3-L9-CL; VL3-L6-VL4-L7-VH4-L8-VH3-L9-CH1-L10- CL; VH3-L6-VH4-L7-VL4-L8-VL3-L9-CH1-L10-CL; VL3-L6-VL4-L7-VH4-L8-VH3-L9-CL-L10-CH1; VH3-L6-VH4-L7-VL4-L8-VL3-L9-CL-L10-CH1; VL3-VL4-VH4-VH3-CH1-Fc; VH3-VH4-VL4-VL3-CH1-Fc; VL3-VL4-VH4-VH3-CL-Fc; VH3-VH4-VL4-VL3-CL-Fc; VL3-VL4-VH4-VH3-CH1-CL-Fc; VH3-VH4-VL4-VL3-CH1-CL-Fc; VL3-VL4-VH4-VH3-CL-CH1-Fc; VH3-VH4-VL4-VL3-CL-CH1-Fc; VL3-L6-VL4-L7-VH4-L8-VH3-L9-CH1-Fc; VH3-L6-VH4-L7-VL4-L8-VL3-L9-CH1-Fc; VL3-L6-VL4-L7-VH4-L8-VH3-L9-CL-Fc; VH3-L6-VH4-L7-VL4-L8-VL3-L9-CL-Fc; VL3-L6-VL4-L7-VH4-L8-VH3-L9-CH1-L10-CL-Fc; VH3-L6-VH4-L7-VL4-L8-VL3-L9-CH1-L10-CL-Fc; VL3-L6-VL4-L7-VH4-L8-VH3-L9-CL-L10-CH1-Fc; or VH3-L6-VH4-L7-VL4-L8-VL3-L9-CL-L10-CH1-Fc. In some aspects, the first polypeptide has a structure represented by VH1-VH2-VL2-VL1-CL, and the second polypeptide has a structure represented by VL3-VL4-VH4-VH3; VH3-VH4-VL4-VL3; VL3-L4-VL4-L5-VH4-L6-VH3; VH3-L4-VH4-L5-VL4-L6-VL3; VL3-VL4-VH4-VH3-Fc; VH3-VH4-VL4-VL3-Fc; VL3-L5-VL4-L6-VH4-L7-VH3-Fc; VH3-L5-VH4-L6-VL4-L7-VL3-Fc; VL3-L5-VL4-L6-VH4-L7-VH3-L8-Fc; VH3-L5-VH4-L6-VL4-L7-VL3-L8-Fc; VL3-VL4-VH4-VH3-CH1; VH3-VH4-VL4-VL3-CH1; VL3-VL4-VH4-VH3-CL; VH3-VH4-VL4-VL3-CL; VL3-VL4-VH4-VH3-CH1-CL; VH3-VH4-VL4-VL3-CH1-CL; VL3-VL4-VH4-VH3-CL-CH1; VH3-VH4-VL4-VL3-CL-CH1; VL3-L6-VL4-L7-VH4-L8-VH3-L9-CH1; VH3-L6-VH4-L7-VL4-L8-VL3-L9-CH1; VL3-L6-VL4-L7-VH4-L8-VH3-L9-CL; VH3-L6-VH4-L7-VL4-L8-VL3-L9-CL; VL3-L6-VL4-L7-VH4-L8-VH3-L9-CH1-L10-CL; VH3-L6-VH4-L7-VL4-L8-VL3- L9-CH1-L10-CL; VL3-L6-VL4-L7-VH4-L8-VH3-L9-CL-L10-CH1; VH3-L6-VH4-L7-VL4-L8-VL3-L9-CL-L10-CH1; VL3-VL4-VH4-VH3-CH1-Fc; VH3-VH4-VL4-VL3-CH1-Fc; VL3-VL4-VH4-VH3-CL-Fc; VH3-VH4-VL4-VL3-CL-Fc; VL3-VL4-VH4-VH3-CH1-CL-Fc; VH3-VH4-VL4-VL3-CH1-CL-Fc; VL3-VL4-VH4-VH3-CL-CH1-Fc; VH3-VH4-VL4-VL3-CL-CH1-Fc; VL3-L6-VL4-L7-VH4-L8-VH3-L9-CH1-Fc; VH3-L6-VH4-L7-VL4-L8-VL3-L9-CH1-Fc; VL3-L6-VL4-L7-VH4-L8-VH3-L9-CL-Fc; VH3-L6-VH4-L7-VL4-L8-VL3-L9-CL-Fc; VL3-L6-VL4-L7-VH4-L8-VH3-L9-CH1-L10-CL-Fc; VH3-L6-VH4-L7-VL4-L8-VL3-L9-CH1-L10-CL-Fc; VL3-L6-VL4-L7-VH4-L8-VH3-L9-CL-L10-CH1-Fc; or VH3-L6-VH4-L7-VL4-L8-VL3-L9-CL-L10-CH1-Fc. In some aspects, the first polypeptide has a structure represented by VL1-VL2-VH2-VH1-CH1-CL, and the second polypeptide has a structure represented by VL3-VL4-VH4-VH3; VH3-VH4-VL4-VL3; VL3-L4-VL4-L5-VH4-L6-VH3; VH3-L4-VH4-L5-VL4-L6-VL3; VL3-VL4-VH4-VH3-Fc; VH3-VH4-VL4-VL3-Fc; VL3-L5-VL4-L6-VH4-L7-VH3-Fc; VH3-L5-VH4-L6-VL4-L7-VL3-Fc; VL3-L5-VL4-L6-VH4-L7-VH3-L8-Fc; VH3-L5-VH4-L6-VL4-L7-VL3-L8-Fc; VL3-VL4-VH4-VH3-CH1; VH3-VH4-VL4-VL3-CH1; VL3-VL4-VH4-VH3-CL; VH3-VH4-VL4-VL3-CL; VL3-VL4-VH4-VH3-CH1-CL; VH3-VH4-VL4-VL3-CH1-CL; VL3-VL4-VH4-VH3-CL-CH1; VH3-VH4-VL4-VL3-CL-CH1; VL3-L6-VL4-L7-VH4-L8-VH3-L9-CH1; VH3-L6-VH4-L7-VL4-L8-VL3-L9-CH1; VL3-L6-VL4-L7-VH4-L8-VH3-L9-CL; VH3-L6-VH4-L7-VL4-L8-VL3-L9-CL; VL3-L6-VL4-L7-VH4-L8-VH3-L9-CH1-L10-CL; VH3-L6-VH4-L7-VL4-L8-VL3-L9-CH1-L10-CL; VL3-L6-VL4-L7-VH4-L8-VH3-L9-CL-L10-CH1; VH3-L6-VH4-L7-VL4-L8-VL3-L9-CL-L10-CH1; VL3-VL4-VH4-VH3-CH1-Fc; VH3-VH4-VL4-VL3-CH1-Fc; VL3-VL4-VH4-VH3-CL-Fc; VH3-VH4-VL4-VL3-CL-Fc; VL3-VL4-VH4-VH3-CH1-CL-Fc; VH3-VH4-VL4-VL3-CH1-CL-Fc; VL3-VL4-VH4-VH3-CL-CH1-Fc; VH3-VH4-VL4-VL3-CL-CH1-Fc; VL3-L6-VL4-L7-VH4-L8-VH3-L9-CH1-Fc; VH3-L6-VH4-L7-VL4-L8-VL3-L9-CH1-Fc; VL3-L6-VL4-L7-VH4-L8-VH3-L9-CL-Fc; VH3-L6-VH4-L7-VL4-L8-VL3-L9-CL-Fc; VL3-L6-VL4-L7-VH4-L8-VH3-L9-CH1-L10-CL-Fc; VH3-L6-VH4-L7-VL4-L8-VL3-L9-CH1-L10-CL-Fc; VL3-L6-VL4-L7-VH4-L8-VH3-L9-CL-L10-CH1-Fc; or VH3-L6-VH4-L7-VL4-L8-VL3-L9-CL-L10-CH1-Fc. In some aspects, the first polypeptide has a structure represented by VH1-VH2-VL2-VL1-CH1-CL, and the second polypeptide has a structure represented by VL3-VL4-VH4-VH3; VH3-VH4-VL4-VL3; VL3-L4-VL4-L5-VH4-L6-VH3; VH3-L4-VH4-L5-VL4-L6-VL3; VL3-VL4-VH4-VH3-Fc; VH3-VH4-VL4-VL3-Fe; VL3-L5-VL4-L6-VH4-L7-VH3-Fc; VH3-L5-VH4-L6-VL4-L7-VL3-Fc; VL3-L5-VL4-L6-VH4-L7-VH3-L8-Fc; VH3-L5-VH4-L6-VL4-L7-VL3-L8-Fc; VL3-VL4-VH4-VH3-CH1; VH3-VH4-VL4-VL3-CH1; VL3-VL4-VH4-VH3-CL; VH3-VH4-VL4-VL3-CL; VL3-VL4-VH4-VH3-CH1-CL; VH3-VH4-VL4-VL3-CH1-CL; VL3-VL4-VH4-VH3-CL-CH1; VH3-VH4-VL4-VL3-CL-CH1; VL3-L6-VL4-L7-VH4-L8-VH3-L9-CH1; VH3-L6-VH4-L7-VL4-L8-VL3-L9-CH1; VL3-L6-VL4-L7-VH4-L8-VH3-L9-CL; VH3-L6-VH4-L7-VL4-L8-VL3-L9-CL; VL3-L6-VL4- L7-VH4-L8-VH3-L9-CH1-L10-CL; VH3-L6-VH4-L7-VL4-L8-VL3-L9-CH1-L10-CL; VL3-L6-VL4-L7-VH4-L8-VH3-L9-CL-L10-CH1; VH3-L6-VH4-L7-VL4-L8-VL3-L9-CL-L10-CH1; VL3-VL4-VH4-VH3-CH1-Fc; VH3-VH4-VL4-VL3-CH1-Fc; VL3-VL4-VH4-VH3-CL-Fc; VH3-VH4-VL4-VL3-CL-Fc; VL3-VL4-VH4-VH3-CH1-CL-Fc; VH3-VH4-VL4-VL3-CH1-CL-Fc; VL3-VL4-VH4-VH3-CL-CH1-Fc; VH3-VH4-VL4-VL3-CL-CH1-Fc; VL3-L6-VL4-L7-VH4-L8-VH3-L9-CH1-Fc; VH3-L6-VH4-L7-VL4-L8-VL3-L9-CH1-Fc; VL3-L6-VL4-L7-VH4-L8-VH3-L9-CL-Fc; VH3-L6-VH4-L7-VL4-L8-VL3-L9-CL-Fc; VL3-L6-VL4-L7-VH4-L8-VH3-L9-CH1-L10-CL-Fc; VH3-L6-VH4-L7-VL4-L8-VL3-L9-CH1-L10-CL-Fc; VL3-L6-VL4-L7-VH4-L8-VH3-L9-CL-L10-CH1-Fc; or VH3-L6-VH4-L7-VL4-L8-VL3-L9-CL-L10-CH1-Fc. In some aspects, the first polypeptide has a structure represented by VL1-VL2-VH2-VH1-CL-CH1, and the second polypeptide has a structure represented by VL3-VL4-VH4-VH3; VH3-VH4-VL4-VL3; VL3-L4-VL4-L5-VH4-L6-VH3; VH3-L4-VH4-L5-VL4-L6-VL3; VL3-VL4-VH4-VH3-Fc; VH3-VH4-VL4-VL3-Fc; VL3-L5-VL4-L6-VH4-L7-VH3-Fc; VH3-L5-VH4-L6-VL4-L7-VL3-Fc; VL3-L5-VL4-L6-VH4-L7-VH3-L8-Fc; VH3-L5-VH4-L6-VL4-L7-VL3-L8-Fc; VL3-VL4-VH4-VH3-CH1; VH3-VH4-VL4-VL3-CH1; VL3-VL4-VH4-VH3-CL; VH3-VH4-VL4-VL3-CL; VL3-VL4-VH4-VH3-CH1-CL; VH3-VH4-VL4-VL3-CH1-CL; VL3-VL4-VH4-VH3-CL-CH1; VH3-VH4-VL4-VL3-CL-CH1; VL3-L6-VL4-L7-VH4-L8-VH3-L9-CH1; VH3-L6-VH4-L7-VL4-L8-VL3-L9-CH1; VL3-L6-VL4-L7-VH4-L8-VH3-L9-CL; VH3-L6-VH4-L7-VL4-L8-VL3-L9-CL; VL3-L6-VL4-L7-VH4-L8-VH3- L9-CH1-L10-CL; VH3-L6-VH4-L7-VL4-L8-VL3-L9-CH1-L10-CL; VL3-L6-VL4-L7-VH4-L8-VH3-L9-CL-L10-CH1; VH3-L6-VH4-L7-VL4-L8-VL3-L9-CL-L10-CH1; VL3-VL4-VH4-VH3-CH1-Fc; VH3-VH4-VL4-VL3-CH1-Fc; VL3-VL4-VH4-VH3-CL-Fc; VH3-VH4-VL4-VL3-CL-Fc; VL3-VL4-VH4-VH3-CH1-CL-Fc; VH3-VH4-VL4-VL3-CH1-CL-Fc; VL3-VL4-VH4-VH3-CL-CH1-Fc; VH3-VH4-VL4-VL3-CL-CH1-Fc; VL3-L6-VL4-L7-VH4-L8-VH3-L9-CH1-Fc; VH3-L6-VH4-L7-VL4-L8-VL3-L9-CH1-Fc; VL3-L6-VL4-L7-VH4-L8-VH3-L9-CL-Fc; VH3-L6-VH4-L7-VL4-L8-VL3-L9-CL-Fc; VL3-L6-VL4-L7-VH4-L8-VH3-L9-CH1-L10-CL-Fc; VH3-L6-VH4-L7-VL4-L8-VL3-L9-CH1-L10-CL-Fc; VL3-L6-VL4-L7-VH4-L8-VH3-L9-CL-L10-CH1-Fc; or VH3-L6-VH4-L7-VL4-L8-VL3-L9-CL-L10-CH1-Fc. In some aspects, the first polypeptide has a structure represented by VH1-VH2-VL2-VL1-CL-CH1, and the second polypeptide has a structure represented by VL3-VL4-VH4-VH3; VH3-VH4-VL4-VL3; VL3-L4-VL4-L5-VH4-L6-VH3; VH3-L4-VH4-L5-VL4-L6-VL3; VL3-VL4-VH4-VH3-Fc; VH3-VH4-VL4-VL3-Fc; VL3-L5-VL4-L6-VH4-L7-VH3-Fc; VH3-L5-VH4-L6-VL4-L7-VL3-Fc; VL3-L5-VL4-L6-VH4-L7-VH3-L8-Fc; VH3-L5-VH4-L6-VL4-L7-VL3-L8-Fc; VL3-VL4-VH4-VH3-CH1; VH3-VH4-VL4-VL3-CH1; VL3-VL4-VH4-VH3-CL; VH3-VH4-VL4-VL3-CL; VL3-VL4-VH4-VH3-CH1-CL; VH3-VH4-VL4-VL3-CH1-CL; VL3-VL4-VH4-VH3-CL-CH1; VH3-VH4-VL4-VL3-CL-CH1; VL3-L6-VL4-L7-VH4-L8-VH3-L9-CH1; VH3-L6-VH4-L7-VL4-L8-VL3-L9-CH1; VL3-L6-VL4-L7-VH4-L8-VH3-L9-CL; VH3-L6-VH4-L7-VL4-L8-VL3-L9-CL; VL3-L6-VL4-L7-VH4-L8-VH3-L9-CH1-L10-CL; VH3-L6-VH4-L7-VL4-L8-VL3-L9-CH1-L10-CL; VL3-L6-VL4-L7-VH4-L8-VH3-L9-CL-L10-CH1; VH3-L6-VH4-L7-VL4-L8-VL3-L9-CL-L10-CH1; VL3-VL4-VH4-VH3-CH1-Fc; VH3-VH4-VL4-VL3-CH1-Fc; VL3-VL4-VH4-VH3-CL-Fc; VH3-VH4-VL4-VL3-CL-Fc; VL3-VL4-VH4-VH3-CH1-CL-Fc; VH3-VH4-VL4-VL3-CH1-CL-Fc; VL3-VL4-VH4-VH3-CL-CH1-Fc; VH3-VH4-VL4-VL3-CL-CH1-Fc; VL3-L6-VL4-L7-VH4-L8-VH3-L9-CH1-Fc; VH3-L6-VH4-L7-VL4-L8-VL3-L9-CH1-Fc; VL3-L6-VL4-L7-VH4-L8-VH3-L9-CL-Fc; VH3-L6-VH4-L7-VL4-L8-VL3-L9-CL-Fc; VL3-L6-VL4-L7-VH4-L8-VH3-L9-CH1-L10-CL-Fc; VH3-L6-VH4-L7-VL4-L8-VL3-L9-CH1-L10-CL-Fc; VL3-L6-VL4-L7-VH4-L8-VH3-L9-CL-L10-CH1-Fc; or VH3-L6-VH4-L7-VL4-L8-VL3-L9-CL-L10-CH1-F c. In some aspects, the first polypeptide has a structure represented by VL1-L1-VL2-L2-VH2-L3-VH1-L4-CH1, and the second polypeptide has a structure represented by VL3-VL4-VH4-VH3; VH3-VH4-VL4-VL3; VL3-L4-VL4-L5-VH4-L6-VH3; VH3-L4-VH4-L5-VL4-L6-VL3; VL3-VL4-VH4-VH3-Fc; VH3-VH4-VL4-VL3-Fc; VL3-L5-VL4-L6-VH4-L7-VH3-Fc; VH3-L5-VH4-L6-VL4-L7-VL3-Fc; VL3-L5-VL4-L6-VH4-L7-VH3-L8-Fc; VH3-L5-VH4-L6-VL4-L7-VL3-L8-Fc; VL3-VL4-VH4-VH3-CH1; VH3-VH4-VL4-VL3-CH1; VL3-VL4-VH4-VH3-CL; VH3-VH4-VL4-VL3-CL; VL3-VL4-VH4-VH3-CH1-CL; VH3-VH4-VL4-VL3-CH1-CL; VL3-VL4-VH4-VH3-CL-CH1; VH3-VH4-VL4-VL3-CL-CH1; VL3-L6-VL4-L7-VH4-L8-VH3-L9-CH1; VH3-L6-VH4-L7-VL4-L8-VL3-L9-CH1; VL3-L6-VL4-L7-VH4-L8-VH3-L9-CL; VH3-L6-VH4-L7-VL4-L8-VL3-L9-CL; VL3-L6-VL4-L7-VH4-L8-VH3-L9-CH1-L10-CL; VH3-L6-VH4-L7-VL4-L8-VL3- L9-CH1-L10-CL; VL3-L6-VL4-L7-VH4-L8-VH3-L9-CL-L10-CH1; VH3-L6-VH4-L7-VL4-L8-VL3-L9-CL-L10-CH1; VL3-VL4-VH4-VH3-CH1-Fc; VH3-VH4-VL4-VL3-CH1-Fc; VL3-VL4-VH4-VH3-CL-Fc; VH3-VH4-VL4-VL3-CL-Fc; VL3-VL4-VH4-VH3-CH1-CL-Fc; VH3-VH4-VL4-VL3-CH1-CL-Fc; VL3-VL4-VH4-VH3-CL-CH1-Fc; VH3-VH4-VL4-VL3-CL-CH1-Fc; VL3-L6-VL4-L7-VH4-L8-VH3-L9-CH1-Fc; VH3-L6-VH4-L7-VL4-L8-VL3-L9-CH1-Fc; VL3-L6-VL4-L7-VH4-L8-VH3-L9-CL-Fc; VH3-L6-VH4-L7-VL4-L8-VL3-L9-CL-Fc; VL3-L6-VL4-L7-VH4-L8-VH3-L9-CH1-L10-CL-Fc; VH3-L6-VH4-L7-VL4-L8-VL3-L9-CH1-L10-CL-Fc; VL3-L6-VL4-L7-VH4-L8-VH3-L9-CL-L10-CH1-Fc; or VH3-L6-VH4-L7-VL4-L8-VL3-L9-CL-L10-CH1-Fc. In some aspects, the first polypeptide has a structure represented by VH1-L1-VH2-L2-VL2-L3-VL1-L4-CH1, and the second polypeptide has a structure represented by VL3-VL4-VH4-VH3; VH3-VH4-VL4-VL3; VL3-L4-VL4-L5-VH4-L6-VH3; VH3-L4-VH4-L5-VL4-L6-VL3; VL3-VL4-VH4-VH3-Fc; VH3-VH4-VL4-VL3-Fc; VL3-L5-VL4-L6-VH4-L7-VH3-Fc; VH3-L5-VH4-L6-VL4-L7-VL3-Fc; VL3-L5-VL4-L6-VH4-L7-VH3-L8-Fc; VH3-L5-VH4-L6-VL4-L7-VL3-L8-Fc; VL3-VL4-VH4-VH3-CH1; VH3-VH4-VL4-VL3-CH1; VL3-VL4-VH4-VH3-CL; VH3-VH4-VL4-VL3-CL; VL3-VL4-VH4-VH3-CH1-CL; VH3-VH4-VL4-VL3-CH1-CL; VL3-VL4-VH4-VH3-CL-CH1; VH3-VH4-VL4-VL3-CL-CH1; VL3-L6-VL4-L7-VH4-L8-VH3-L9-CH1; VH3-L6-VH4-L7-VL4-L8-VL3-L9-CH1; VL3-L6-VL4-L7-VH4-L8-VH3-L9-CL; VH3-L6- VH4-L7-VL4-L8-VL3-L9-CL; VL3-L6-VL4-L7-VH4-L8-VH3-L9-CH1-L10-CL; VH3-L6-VH4-L7-VL4-L8-VL3-L9-CH1- L10-CL; VL3-L6-VL4-L7-VH4-L8-VH3-L9-CL-L10-CH1; VH3-L6-VH4-L7-VL4-L8-VL3-L9-CL-L10-CH1; VL3-VL4-VH4-VH3-CH1-Fc; VH3-VH4-VL4-VL3-CH1-Fc; VL3-VL4-VH4-VH3-CL-Fc; VH3-VH4-VL4-VL3-CL-Fc; VL3-VL4-VH4-VH3-CH1-CL-Fc; VH3-VH4-VL4-VL3-CH1-CL-Fc; VL3-VL4-VH4-VH3-CL-CH1-Fc; VH3-VH4-VL4-VL3-CL-CH1-Fc; VL3-L6-VL4-L7-VH4-L8-VH3-L9-CH1-Fc; VH3-L6-VH4-L7-VL4-L8-VL3-L9-CH1-Fc; VL3-L6-VL4-L7-VH4-L8-VH3-L9-CL-Fc; VH3-L6-VH4-L7-VL4-L8-VL3-L9-CL-Fc; VL3-L6-VL4-L7-VH4-L8-VH3-L9-CH1-L10-CL-Fc; VH3-L6-VH4-L7-VL4-L8-VL3-L9-CH1-L10-CL-Fc; VL3-L6-VL4-L7-VH4-L8-VH3-L9-CL-L10-CH1-Fc; or VH3-L6-VH4-L7-VL4-L8-VL3-L9-CL-L10-CH1-Fc. In some aspects, the first polypeptide has a structure represented by VL1-L1-VL2-L2-VH2-L3-VH1-L4-CL, and the second polypeptide has a structure represented by VL3-VL4-VH4-VH3; VH3-VH4-VL4-VL3; VL3-L4-VL4-L5-VH4-L6-VH3; VH3-L4-VH4-L5-VL4-L6-VL3; VL3-VL4-VH4-VH3-Fc; VH3-VH4-VL4-VL3-Fc; VL3-L5-VL4-L6-VH4-L7-VH3-Fc; VH3-L5-VH4-L6-VL4-L7-VL3-Fc; VL3-L5-VL4-L6-VH4-L7-VH3-L8-Fc; VH3-L5-VH4-L6-VL4-L7-VL3-L8-Fc; VL3-VL4-VH4-VH3-CH1; VH3-VH4-VL4-VL3-CH1; VL3-VL4-VH4-VH3-CL; VH3-VH4-VL4-VL3-CL; VL3-VL4-VH4-VH3-CH1-CL; VH3-VH4-VL4-VL3-CH1-CL; VL3-VL4-VH4-VH3-CL-CH1; VH3-VH4-VL4-VL3-CL-CH1; VL3-L6-VL4-L7-VH4-L8-VH3-L9-CH1; VH3-L6-VH4-L7-VL4-L8-VL3-L9-CH1; VL3-L6-VL4-L7-VH4-L8-VH3-L9-CL; VH3-L6-VH4-L7-VL4-L8-VL3-L9-CL; VL3-L6-VL4-L7-VH4-L8-VH3-L9-CH1-L10-CL; VH3-L6-VH4-L7-VL4-L8-VL3-L9-CH1-L10-CL; VL3-L6-VL4-L7-VH4-L8-VH3-L9-CL-L10-CH1; VH3-L6-VH4-L7-VL4-L8-VL3-L9-CL-L10-CH1; VL3-VL4-VH4-VH3-CH1-Fc; VH3-VH4-VL4-VL3-CH1-Fc; VL3-VL4-VH4-VH3-CL-Fc; VH3-VH4-VL4-VL3-CL-Fc; VL3-VL4-VH4-VH3-CH1-CL-Fc; VH3-VH4-VL4-VL3-CH1-CL-Fc; VL3-VL4-VH4-VH3-CL-CH1-Fc; VH3-VH4-VL4-VL3-CL-CH1-Fc; VL3-L6-VL4-L7-VH4-L8-VH3-L9-CH1-Fc; VH3-L6-VH4-L7-VL4-L8-VL3-L9-CH1-Fc; VL3-L6-VL4-L7-VH4-L8-VH3-L9-CL-Fc; VH3-L6-VH4-L7-VL4-L8-VL3-L9-CL-Fc; VL3-L6-VL4-L7-VH4-L8-VH3-L9-CH1-L10-CL-Fc; VH3-L6-VH4-L7-VL4-L8-VL3-L9-CH1-L10-CL-Fc; VL3-L6-VL4-L7-VH4-L8-VH3-L9-CL-L10-CH1-Fc; or VH3-L6-VH4-L7-VL4-L8-VL3-L9-CL-L10-CH1-Fc. In some aspects, the first polypeptide has a structure represented by VH1-L1-VH2-L2-VL2-L3-VL1-L4-CL, and the second polypeptide has a structure represented by VL3-VL4-VH4-VH3; VH3-VH4-VL4-VL3; VL3-L4-VL4-L5-VH4-L6-VH3; VH3-L4-VH4-L5-VL4-L6-VL3; VL3-VL4-VH4-VH3- Fc; VH3-VH4-VL4-VL3-Fc; VL3-L5-VL4-L6-VH4-L7-VH3-Fc; VH3-L5-VH4-L6-VL4-L7-VL3-Fc; VL3-L5-VL4-L6-VH4-L7-VH3-L8-Fc; VH3-L5-VH4-L6-VL4-L7-VL3-L8-Fc; VL3-VL4-VH4-VH3-CH1; VH3-VH4-VL4-VL3-CH1; VL3-VL4-VH4-VH3-CL; VH3-VH4-VL4-VL3-CL; VL3-VL4-VH4-VH3-CH1-CL; VH3-VH4-VL4-VL3-CH1-CL; VL3-VL4-VH4-VH3-CL-CH1; VH3-VH4-VL4-VL3-CL-CH1; VL3-L6-VL4-L7-VH4-L8-VH3-L9-CH1; VH3-L6-VH4-L7-VL4-L8-VL3-L9-CH1; VL3-L6-VL4-L7-VH4-L8-VH3-L9-CL; VH3-L6-VH4-L7-VL4-L8-VL3-L9-CL; VL3-L6-VL4-L7-VH4-L8-VH3-L9-CH1-L10-CL; VH3-L6-VH4-L7-VL4-L8-VL3-L9-CH1-L10-CL; VL3-L6-VL4-L7- VH4-L8-VH3-L9-CL-L10-CH1; VH3-L6-VH4-L7-VL4-L8-VL3-L9-CL-L10-CH1; VL3-VL4-VH4-VH3-CH1-Fc; VH3-VH4-VL4-VL3-CH1-Fc; VL3-VL4-VH4-VH3-CL-Fc; VH3-VH4-VL4-VL3-CL-Fc; VL3-VL4-VH4-VH3-CH1-CL-Fc; VH3-VH4-VL4-VL3-CH1-CL-Fc; VL3-VL4-VH4-VH3-CL-CH1-Fc; VH3-VH4-VL4-VL3-CL-CH1-Fc; VL3-L6-VL4-L7-VH4-L8-VH3-L9-CH1-Fc; VH3-L6-VH4-L7-VL4-L8-VL3-L9-CH1-Fc; VL3-L6-VL4-L7-VH4-L8-VH3-L9- CL-Fc; VH3-L6-VH4-L7-VL4-L8-VL3-L9-CL-Fc; VL3-L6-VL4-L7-VH4-L8-VH3-L9-CH1-L10-CL-Fc; VH3-L6-VH4-L7-VL4-L8-VL3-L9-CH1-L10-CL-Fc; VL3-L6-VL4-L7-VH4-L8-VH3-L9-CL-L10-CH1-Fc; or VH3-L6-VH4-L7-VL4-L8-VL3-L9-CL-L10-CH1-Fc. In some aspects, the first polypeptide has a structure represented by VL1-L1-VL2-L2-VH2-L3-VH1-L4-CH1-L5-CL, and the second polypeptide has a structure represented by VL3-VL4-VH4-VH3; VH3-VH4-VL4-VL3; VL3-L4-VL4-L5-VH4-L6-VH3; VH3-L4-VH4-L5-VL4-L6-VL3; VL3-VL4-VH4-VH3-Fc; VH3-VH4-VL4-VL3-Fc; VL3-L5-VL4-L6-VH4-L7-VH3-Fc; VH3-L5-VH4-L6-VL4-L7-VL3-Fc; VL3-L5-VL4-L6-VH4-L7-VH3-L8-Fc; VH3-L5-VH4-L6-VL4-L7-VL3-L8-Fc; VL3-VL4-VH4-VH3-CH1; VH3-VH4-VL4-VL3-CH1; VL3-VL4-VH4-VH3-CL; VH3-VH4-VL4-VL3-CL; VL3-VL4-VH4-VH3-CH1-CL; VH3-VH4-VL4-VL3-CH1-CL; VL3-VL4-VH4-VH3-CL-CH1; VH3-VH4-VL4-VL3-CL-CH1; VL3-L6-VL4-L7-VH4-L8-VH3-L9-CH1; VH3-L6-VH4-L7-VL4-L8-VL3-L9-CH1; VL3-L6-VL4-L7-VH4-L8-VH3-L9-CL; VH3-L6-VH4-L7-VL4-L8-VL3-L9-CL; VL3-L6-VL4-L7- VH4-L8-VH3-L9-CH1-L10-CL; VH3-L6-VH4-L7-VL4-L8-VL3-L9-CH1-L10-CL; VL3-L6-VL4-L7-VH4-L8-VH3-L9- CL-L10-CH1; VH3-L6-VH4-L7-VL4-L8-VL3-L9-CL-L10-CH1; VL3-VL4-VH4-VH3-CH1-Fc; VH3-VH4-VL4-VL3-CH1-Fc; VL3-VL4-VH4-VH3-CL-Fc; VH3-VH4-VL4-VL3-CL-Fc; VL3-VL4-VH4-VH3-CH1-CL-Fc; VH3-VH4-VL4-VL3-CH1-CL-Fc; VL3-VL4-VH4-VH3-CL-CH1-Fc; VH3-VH4-VL4-VL3-CL-CH1-Fc; VL3-L6-VL4-L7-VH4-L8-VH3-L9-CH1-Fc; VH3-L6-VH4-L7-VL4-L8-VL3-L9-CH1-Fc; VL3-L6-VL4-L7-VH4-L8-VH3-L9-CL-Fc; VH3-L6-VH4-L7-VL4-L8-VL3-L9-CL-Fc; VL3-L6-VL4-L7-VH4-L8-VH3-L9-CH1-L10-CL-Fc; VH3-L6-VH4-L7-VL4-L8-VL3-L9-CH1-L10-CL-Fc; VL3-L6-VL4-L7-VH4-L8-VH3-L9-CL-L10-CH1-Fc; or VH3-L6-VH4-L7-VL4-L8-VL3-L9-CL-L10-CH1-Fc. In some aspects, the first polypeptide has a structure represented by VH1-L1-VH2-L2-VL2-L3-VL1-L4-CH1-L5-CL, and the second polypeptide has a structure represented by VL3-VL4-VH4-VH3; VH3-VH4-VL4-VL3; VL3-L4-VL4-L5-VH4-L6-VH3; VH3-L4-VH4-L5-VL4-L6-VL3; VL3-VL4-VH4-VH3-Fc; VH3-VH4-VL4-VL3-Fc; VL3-L5-VL4-L6-VH4-L7-VH3-Fc; VH3-L5-VH4-L6-VL4-L7-VL3-Fc; VL3-L5-VL4-L6-VH4-L7-VH3-L8-Fc; VH3-L5-VH4-L6-VL4-L7-VL3-L8-Fc; VL3-VL4-VH4-VH3-CH1; VH3-VH4-VL4-VL3-CH1; VL3-VL4-VH4-VH3-CL; VH3-VH4-VL4-VL3-CL; VL3-VL4-VH4-VH3-CH1-CL; VH3-VH4-VL4-VL3-CH1-CL; VL3-VL4-VH4-VH3-CL-CH1; VH3-VH4-VL4-VL3-CL-CH1; VL3-L6-VL4-L7-VH4-L8-VH3-L9-CH1; VH3-L6-VH4-L7-VL4-L8-VL3-L9-CH1; VL3-L6-VL4-L7-VH4-L8-VH3-L9-CL; VH3-L6-VH4-L7-VL4-L8-VL3-L9-CL; VL3-L6-VL4-L7-VH4- L8-VH3-L9-CH1-L10-CL; VH3-L6-VH4-L7-VL4-L8-VL3-L9-CH1-L10-CL; VL3-L6-VL4-L7-VH4-L8-VH3-L9-CL-L10-CH1; VH3-L6-VH4-L7-VL4-L8-VL3-L9-CL-L10-CH1; VL3-VL4-VH4-VH3-CH1-Fc; VH3-VH4-VL4-VL3-CH1-Fc; VL3-VL4-VH4-VH3-CL-Fc; VH3-VH4-VL4-VL3-CL-Fc; VL3-VL4-VH4-VH3-CH1-CL-Fc; VH3-VH4-VL4-VL3-CH1-CL-Fc; VL3-VL4-VH4-VH3-CL-CH1-Fc; VH3-VH4-VL4-VL3-CL-CH1-Fc; VL3-L6-VL4-L7-VH4-L8-VH3-L9-CH1-Fc; VH3-L6-VH4-L7-VL4-L8-VL3-L9-CH1-Fc; VL3-L6-VL4-L7-VH4-L8-VH3-L9-CL-Fc; VH3-L6-VH4-L7-VL4-L8-VL3-L9-CL-Fc; VL3-L6-VL4-L7-VH4-L8-VH3-L9-CH1-L10-CL-Fc; VH3-L6-VH4-L7-VL4-L8-VL3-L9-CH1-L10-CL-Fc; VL3-L6-VL4-L7-VH4-L8-VH3-L9-CL-L10-CH1-Fc; or VH3-L6-VH4-L7-VL4-L8-VL3-L9-CL-L10-CH1-Fc. In some aspects, the first polypeptide has a structure represented by VL1-L1-VL2-L2-VH2-L3-VH1-L4-CL-L5-CH1, and the second polypeptide has a structure represented by VL3-VL4-VH4-VH3; VH3-VH4-VL4-VL3; VL3-L4-VL4-L5-VH4-L6-VH3; VH3-L4-VH4-L5-VL4-L6-VL3; VL3-VL4-VH4-VH3-Fc; VH3-VH4-VL4-VL3-Fc; VL3-L5-VL4-L6-VH4-L7-VH3-Fc; VH3-L5-VH4-L6-VL4-L7-VL3-Fc; VL3-L5-VL4-L6-VH4-L7-VH3-L8-Fc; VH3-L5-VH4-L6-VL4-L7-VL3-L8-Fc; VL3-VL4-VH4-VH3-CH1; VH3-VH4-VL4-VL3-CH1; VL3-VL4-VH4-VH3-CL; VH3-VH4-VL4-VL3-CL; VL3-VL4-VH4-VH3-CH1-CL; VH3-VH4-VL4-VL3-CH1-CL; VL3-VL4-VH4-VH3-CL-CH1; VH3-VH4-VL4-VL3-CL-CH1; VL3-L6-VL4-L7-VH4-L8-VH3-L9-CH1; VH3-L6-VH4-L7-VL4-L8-VL3-L9-CH1; VL3-L6-VL4-L7-VH4-L8-VH3-L9-CL; VH3-L6-VH4-L7-VL4-L8-VL3-L9-CL; VL3-L6-VL4-L7-VH4-L8-VH3- L9-CH1-L10-CL; VH3-L6-VH4-L7-VL4-L8-VL3-L9-CH1-L10-CL; VL3-L6-VL4-L7-VH4-L8-VH3-L9-CL-L10-CH1; VH3-L6-VH4-L7-VL4-L8-VL3-L9-CL-L10-CH1; VL3-VL4-VH4-VH3-CH1-Fc; VH3-VH4-VL4-VL3-CH1-Fc; VL3-VL4-VH4-VH3-CL-Fc; VH3-VH4-VL4-VL3-CL-Fc; VL3-VL4-VH4-VH3-CH1-CL-Fc; VH3-VH4-VL4-VL3-CH1-CL-Fc; VL3-VL4-VH4-VH3-CL-CH1-Fc; VH3-VH4-VL4-VL3-CL-CH1-Fc; VL3-L6-VL4-L7-VH4-L8-VH3-L9-CH1-Fc; VH3-L6-VH4-L7-VL4-L8-VL3-L9-CH1-Fc; VL3-L6-VL4-L7-VH4-L8-VH3-L9-CL-Fc; VH3-L6-VH4-L7-VL4-L8-VL3-L9-CL-Fc; VL3-L6-VL4-L7-VH4-L8-VH3-L9-CH1-L10-CL-Fc; VH3-L6-VH4-L7-VL4-L8-VL3-L9-CH1-L10-CL-Fc; VL3-L6-VL4-L7-VH4-L8-VH3-L9-CL-L10-CH1-Fc; or VH3-L6-VH4-L7-VL4-L8-VL3-L9-CL-L10-CH1-Fc. In some aspects, the first polypeptide has a structure represented by VH1-L1-VH2-L2-VL2-L3-VL1-L4-CL-L5-CH1, and the second polypeptide has a structure represented by VL3-VL4-VH4-VH3; VH3-VH4-VL4-VL3; VL3-L4-VL4-L5-VH4-L6-VH3; VH3-L4-VH4-L5-VL4-L6-VL3; VL3-VL4-VH4-VH3-Fc; VH3-VH4-VL4-VL3-Fc; VL3-L5-VL4-L6-VH4-L7-VH3-Fc; VH3-L5-VH4-L6-VL4-L7-VL3-Fc; VL3-L5-VL4-L6-VH4-L7-VH3-L8-Fc; VH3-L5-VH4-L6-VL4-L7-VL3-L8-Fc; VL3-VL4-VH4-VH3-CH1; VH3-VH4-VL4-VL3-CH1; VL3-VL4-VH4-VH3-CL; VH3-VH4-VL4-VL3-CL; VL3-VL4-VH4-VH3-CH1-CL; VH3-VH4-VL4-VL3-CH1-CL; VL3-VL4-VH4-VH3-CL-CH1; VH3-VH4-VL4-VL3-CL-CH1; VL3-L6-VL4-L7-VH4-L8-VH3-L9-CH1; VH3-L6-VH4-L7-VL4-L8-VL3-L9-CH1; VL3- L6-VL4-L7-VH4-L8-VH3-L9-CL; VH3-L6-VH4-L7-VL4-L8-VL3-L9-CL; VL3-L6-VL4-L7-VH4-L8-VH3-L9-CH1- L10-CL; VH3-L6-VH4-L7-VL4-L8-VL3-L9-CH1-L10-CL; VL3-L6-VL4-L7-VH4-L8-VH3-L9-CL-L10-CH1; VH3-L6-VH4-L7-VL4-L8-VL3-L9-CL-L10-CH1; VL3-VL4-VH4-VH3-CH1-Fc; VH3-VH4-VL4-VL3-CH1-Fc; VL3-VL4-VH4-VH3-CL-Fc; VH3-VH4-VL4-VL3-CL-Fc; VL3-VL4-VH4-VH3-CH1-CL-Fc; VH3-VH4-VL4-VL3-CH1-CL-Fc; VL3-VL4-VH4-VH3-CL-CH1-Fc; VH3-VH4-VL4-VL3-CL-CH1-Fc; VL3-L6-VL4-L7-VH4-L8-VH3-L9-CH1-Fe; VH3-L6-VH4-L7-VL4-L8-VL3-L9-CH1-Fc; VL3-L6-VL4-L7-VH4-L8-VH3-L9-CL-Fc; VH3-L6-VH4-L7-VL4-L8-VL3-L9-CL-Fc; VL3-L6-VL4-L7-VH4-L8-VH3-L9-CH1-L10-CL-Fc; VH3-L6-VH4-L7-VL4-L8-VL3-L9-CH1-L10-CL-Fc; VL3-L6-VL4-L7-VH4-L8-VH3-L9-CL-L10-CH1-Fc; or VH3-L6-VH4-L7-VL4-L8-VL3-L9-CL-L10-CH1-Fc. In some aspects, the first polypeptide has a structure represented by VL1-VL2-VH2-VH1-CH1-Fc, and the second polypeptide has a structure represented by VL3-VL4-VH4-VH3; VH3-VH4-VL4-VL3; VL3-L4-VL4-L5-VH4-L6-VH3; VH3-L4-VH4-L5-VL4-L6-VL3; VL3-VL4-VH4-VH3-Fc; VH3-VH4-VL4-VL3-Fc; VL3-L5-VL4-L6-VH4-L7-VH3-Fc; VH3-L5-VH4-L6-VL4-L7-VL3-Fc; VL3-L5-VL4-L6-VH4-L7-VH3-L8-Fc; VH3-L5-VH4-L6-VL4-L7-VL3-L8-Fc; VL3-VL4-VH4-VH3-CH1; VH3-VH4-VL4-VL3-CH1; VL3-VL4-VH4-VH3-CL; VH3-VH4-VL4-VL3-CL; VL3-VL4-VH4-VH3-CH1-CL; VH3-VH4-VL4-VL3-CH1-CL; VL3-VL4-VH4-VH3-CL-CH1; VH3-VH4-VL4-VL3-CL-CH1; VL3-L6-VL4-L7-VH4-L8-VH3-L9-CH1; VH3-L6-VH4-L7-VL4-L8-VL3-L9-CH1; VL3-L6-VL4-L7-VH4-L8-VH3-L9-CL; VH3-L6-VH4-L7-VL4-L8-VL3-L9-CL; VL3-L6-VL4-L7-VH4-L8-VH3-L9-CH1-L10-CL; VH3-L6-VH4-L7-VL4-L8-VL3-L9-CH1-L10-CL; VL3-L6-VL4-L7-VH4-L8-VH3-L9-CL-L10-CH1; VH3-L6-VH4-L7-VL4-L8-VL3-L9-CL-L10-CH1; VL3-VL4-VH4-VH3-CH1-Fc; VH3-VH4-VL4-VL3-CH1-Fc; VL3-VL4-VH4-VH3-CL-Fc; VH3-VH4-VL4-VL3-CL-Fc; VL3-VL4-VH4-VH3-CH1-CL-Fc; VH3-VH4-VL4-VL3-CH1-CL-Fc; VL3-VL4-VH4-VH3-CL-CH1-Fc; VH3-VH4-VL4-VL3-CL-CH1-Fc; VL3-L6-VL4-L7-VH4-L8-VH3-L9-CH1-Fc; VH3-L6-VH4-L7-VL4-L8-VL3-L9-CH1-Fc; VL3-L6-VL4-L7-VH4-L8-VH3-L9-CL-Fc; VH3-L6-VH4-L7-VL4-L8-VL3-L9-CL-Fc; VL3-L6-VL4-L7-VH4-L8-VH3-L9-CH1-L10-CL-Fc; VH3-L6-VH4-L7-VL4-L8-VL3-L9-CH1-L10-CL-Fc; VL3-L6-VL4-L7-VH4-L8-VH3-L9-CL-L10-CH1-Fc; or VH3-L6-VH4-L7-VL4-L8-VL3-L9-CL-L10-CH1-F c. In some aspects, the first polypeptide has a structure represented by VH1-VH2-VL2-VL1-CH1-Fc, and the second polypeptide has a structure represented by VL3-VL4-VH4-VH3; VH3-VH4-VL4-VL3; VL3-L4-VL4-L5-VH4-L6-VH3; VH3-L4-VH4-L5-VL4-L6-VL3; VL3-VL4-VH4-VH3-Fc; VH3-VH4-VL4-VL3-Fc; VL3-L5-VL4-L6-VH4-L7-VH3-Fc; VH3-L5-VH4-L6-VL4-L7-VL3-Fc; VL3-L5-VL4-L6-VH4-L7-VH3-L8-Fc; VH3-L5-VH4-L6-VL4-L7-VL3-L8-Fc; VL3-VL4-VH4-VH3-CH1; VH3-VH4-VL4-VL3-CH1; VL3-VL4-VH4-VH3-CL; VH3-VH4-VL4-VL3-CL; VL3-VL4-VH4-VH3-CH1-CL; VH3-VH4-VL4-VL3-CH1-CL; VL3-VL4-VH4-VH3-CL-CH1; VH3-VH4-VL4-VL3-CL-CH1; VL3-L6-VL4-L7-VH4-L8-VH3-L9-CH1; VH3-L6-VH4-L7-VL4-L8-VL3-L9-CH1; VL3-L6-VL4-L7-VH4-L8-VH3-L9-CL; VH3-L6- VH4-L7-VL4-L8-VL3-L9-CL; VL3-L6-VL4-L7-VH4-L8-VH3-L9-CH1-L10-CL; VH3-L6-VH4-L7-VL4-L8-VL3-L9-CH1- L10-CL; VL3-L6-VL4-L7-VH4-L8-VH3-L9-CL-L10-CH1; VH3-L6-VH4-L7-VL4-L8-VL3-L9-CL-L10-CH1; VL3-VL4-VH4-VH3-CH1-Fc; VH3-VH4-VL4-VL3-CH1-Fc; VL3-VL4-VH4-VH3-CL-Fc; VH3-VH4-VL4-VL3-CL-Fc; VL3-VL4-VH4-VH3-CH1-CL-Fc; VH3-VH4-VL4-VL3-CH1-CL-Fc; VL3-VL4-VH4-VH3-CL-CH1-Fc; VH3-VH4-VL4-VL3-CL-CH1-Fc; VL3-L6-VL4-L7-VH4-L8-VH3-L9-CH1-Fc; VH3-L6-VH4-L7-VL4-L8-VL3-L9-CH1-Fc; VL3-L6-VL4-L7-VH4-L8-VH3-L9-CL-Fc; VH3-L6-VH4-L7-VL4-L8-VL3-L9-CL-Fc; VL3-L6-VL4-L7-VH4-L8-VH3-L9-CH1-L10-CL-Fc; VH3-L6-VH4-L7-VL4-L8-VL3-L9-CH1-L10-CL-Fc; VL3-L6-VL4-L7-VH4-L8-VH3-L9-CL-L10-CH1-Fc; or VH3-L6-VH4-L7-VL4-L8-VL3-L9-CL-L10-CH1-Fc. In some aspects, the first polypeptide has a structure represented by VL1-VL2-VH2-VH1-CL-Fc, and the second polypeptide has a structure represented by VL3-VL4-VH4-VH3; VH3-VH4-VL4-VL3; VL3-L4-VL4-L5-VH4-L6-VH3; VH3-L4-VH4-L5-VL4-L6-VL3; VL3-VL4-VH4-VH3- Fc; VH3-VH4-VL4-VL3-Fc; VL3-L5-VL4-L6-VH4-L7-VH3-Fc; VH3-L5-VH4-L6-VL4-L7-VL3-Fc; VL3-L5-VL4-L6-VH4-L7-VH3-L8-Fc; VH3-L5-VH4-L6-VL4-L7-VL3-L8-Fc; VL3-VL4-VH4-VH3-CH1; VH3-VH4-VL4-VL3-CH1; VL3-VL4-VH4-VH3-CL; VH3-VH4-VL4-VL3-CL; VL3-VL4-VH4-VH3-CH1-CL; VH3-VH4-VL4-VL3-CH1-CL; VL3-VL4-VH4-VH3-CL-CH1; VH3-VH4-VL4-VL3-CL-CH1; VL3-L6-VL4-L7-VH4-L8-VH3-L9-CH1; VH3-L6-VH4-L7-VL4-L8-VL3-L9-CH1; VL3-L6-VL4-L7-VH4-L8-VH3-L9-CL; VH3-L6-VH4-L7-VL4-L8-VL3-L9-CL; VL3-L6-VL4-L7-VH4-L8-VH3-L9-CH1-L10-CL; VH3-L6-VH4-L7-VL4-L8-VL3-L9-CH1-L10-CL; VL3-L6-VL4-L7- VH4-L8-VH3-L9-CL-L10-CH1; VH3-L6-VH4-L7-VL4-L8-VL3-L9-CL-L10-CH1; VL3-VL4-VH4-VH3-CH1-Fc; VH3-VH4-VL4-VL3-CH1-Fc; VL3-VL4-VH4-VH3-CL-Fc; VH3-VH4-VL4-VL3-CL-Fc; VL3-VL4-VH4-VH3-CH1-CL-Fc; VH3-VH4-VL4-VL3-CH1-CL-Fc; VL3-VL4-VH4-VH3-CL-CH1-Fc; VH3-VH4-VL4-VL3-CL-CH1-Fc; VL3-L6-VL4-L7-VH4-L8-VH3-L9-CH1-Fc; VH3-L6-VH4-L7-VL4-L8-VL3-L9-CH1-Fc; VL3-L6-VL4-L7-VH4-L8-VH3-L9- CL-Fc; VH3-L6-VH4-L7-VL4-L8-VL3-L9-CL-Fc; VL3-L6-VL4-L7-VH4-L8-VH3-L9-CH1-L10-CL-Fc; VH3-L6-VH4-L7-VL4-L8-VL3-L9-CH1-L10-CL-Fc; VL3-L6-VL4-L7-VH4-L8-VH3-L9-CL-L10-CH1-Fc; or VH3-L6-VH4-L7-VL4-L8-VL3-L9-CL-L10-CH1-Fc. In some aspects, the first polypeptide has a structure represented by VH1-VH2-VL2-VL1-CL-Fc, and the second polypeptide has a structure represented by VL3-VL4-VH4-VH3; VH3-VH4-VL4-VL3; VL3-L4-VL4-L5-VH4-L6-VH3; VH3-L4-VH4-L5-VL4-L6-VL3; VL3-VL4-VH4-VH3-Fc; VH3-VH4-VL4-VL3-Fc; VL3-L5-VL4-L6-VH4-L7-VH3-Fc; VH3-L5-VH4-L6-VL4-L7-VL3-Fc; VL3-L5-VL4-L6-VH4-L7-VH3-L8-Fc; VH3-L5-VH4-L6-VL4-L7-VL3-L8-Fc; VL3-VL4-VH4-VH3-CH1; VH3-VH4-VL4-VL3-CH1; VL3-VL4-VH4-VH3-CL; VH3-VH4-VL4-VL3-CL; VL3-VL4-VH4-VH3-CH1-CL; VH3-VH4-VL4-VL3-CH1-CL; VL3-VL4-VH4-VH3-CL-CH1; VH3-VH4-VL4-VL3-CL-CH1; VL3-L6-VL4-L7-VH4-L8-VH3-L9-CH1; VH3-L6-VH4-L7-VL4-L8-VL3-L9-CH1; VL3- L6-VL4-L7-VH4-L8-VH3-L9-CL; VH3-L6-VH4-L7-VL4-L8-VL3-L9-CL; VL3-L6-VL4-L7-VH4-L8-VH3-L9-CH1- L10-CL; VH3-L6-VH4-L7-VL4-L8-VL3-L9-CH1-L10-CL; VL3-L6-VL4-L7-VH4-L8-VH3-L9-CL-L10-CH1; VH3-L6-VH4-L7-VL4-L8-VL3-L9-CL-L10-CH1; VL3-VL4-VH4-VH3-CH1-Fc; VH3-VH4-VL4-VL3-CH1-Fc; VL3-VL4-VH4-VH3-CL-Fc; VH3-VH4-VL4-VL3-CL-Fc; VL3-VL4-VH4-VH3-CH1-CL-Fc; VH3-VH4-VL4-VL3-CH1-CL-Fc; VL3-VL4-VH4-VH3-CL-CH1-Fc; VH3-VH4-VL4-VL3-CL-CH1-Fc; VL3-L6-VL4-L7-VH4-L8-VH3-L9-CH1-Fc; VH3-L6-VH4-L7-VL4-L8-VL3-L9-CH1-Fc; VL3-L6-VL4-L7-VH4-L8-VH3-L9-CL-Fc; VH3-L6-VH4-L7-VL4-L8-VL3-L9-CL-Fc; VL3-L6-VL4-L7-VH4-L8-VH3-L9-CH1-L10-CL-Fc; VH3-L6-VH4-L7-VL4-L8-VL3-L9-CH1-L10-CL-Fc; VL3-L6-VL4-L7-VH4-L8-VH3-L9-CL-L10-CH1-Fc; or VH3-L6-VH4-L7-VL4-L8-VL3-L9-CL-L10-CH1-Fc. In some aspects, the first polypeptide has a structure represented by VL1-VL2-VH2-VH1-CH1-CL-Fc, and the second polypeptide has a structure represented by VL3-VL4-VH4-VH3; VH3-VH4-VL4-VL3; VL3-L4-VL4-L5-VH4-L6-VH3; VH3-L4-VH4-L5-VL4-L6-VL3; VL3-VL4-VH4-VH3-Fc; VH3-VH4-VL4-VL3-Fc; VL3-L5-VL4-L6-VH4-L7-VH3-Fc; VH3-L5-VH4-L6-VL4-L7-VL3-Fc; VL3-L5-VL4-L6-VH4-L7-VH3-L8-Fc; VH3-L5-VH4-L6-VL4-L7-VL3-L8-Fc; VL3-VL4-VH4-VH3-CH1; VH3-VH4-VL4-VL3-CH1; VL3-VL4-VH4-VH3-CL; VH3-VH4-VL4-VL3-CL; VL3-VL4-VH4-VH3-CH1-CL; VH3-VH4-VL4-VL3-CH1-CL; VL3-VL4-VH4-VH3-CL-CH1; VH3-VH4-VL4-VL3-CL-CH1; VL3-L6-VL4-L7-VH4-L8-VH3-L9-CH1; VH3-L6-VH4-L7-VL4-L8-VL3-L9-CH1; VL3-L6-VL4-L7-VH4-L8-VH3-L9-CL; VH3-L6-VH4-L7-VL4-L8-VL3-L9-CL; VL3-L6-VL4-L7-VH4-L8-VH3-L9-CH1-L10-CL; VH3-L6-VH4-L7-VL4-L8-VL3-L9-CH1-L10-CL; VL3-L6-VL4-L7-VH4-L8-VH3-L9-CL-L10-CH1; VH3-L6-VH4-L7-VL4-L8-VL3-L9-CL-L10-CH1; VL3-VL4-VH4-VH3-CH1-Fc; VH3-VH4-VL4-VL3-CH1-Fc; VL3-VL4-VH4-VH3-CL-Fc; VH3-VH4-VL4-VL3-CL-Fc; VL3-VL4-VH4-VH3-CH1-CL-Fc; VH3-VH4-VL4-VL3-CH1-CL-Fc; VL3-VL4-VH4-VH3-CL-CH1-Fc; VH3-VH4-VL4-VL3-CL-CH1-Fc; VL3-L6-VL4-L7-VH4-L8-VH3-L9-CH1-Fc; VH3-L6-VH4-L7-VL4-L8-VL3-L9-CH1-Fc; VL3-L6-VL4-L7-VH4-L8-VH3-L9-CL-Fc; VH3-L6-VH4-L7-VL4-L8-VL3-L9-CL-Fc; VL3-L6-VL4-L7-VH4-L8-VH3-L9-CH1-L10-CL-Fc; VH3-L6-VH4-L7-VL4-L8-VL3-L9-CH1-L10-CL-Fc; VL3-L6-VL4-L7-VH4-L8-VH3-L9-CL-L10-CH1-Fc; or VH3-L6-VH4-L7-VL4-L8-VL3-L9-CL-L10-CH1-F c. In some aspects, the first polypeptide has a structure represented by VH1-VH2-VL2-VL1-CH1-CL-Fc, and the second polypeptide has a structure represented by VL3-VL4-VH4-VH3; VH3-VH4-VL4-VL3; VL3-L4-VL4-L5-VH4-L6-VH3; VH3-L4-VH4-L5-VL4-L6-VL3; VL3-VL4-VH4-VH3-Fc; VH3-VH4-VL4-VL3-Fc; VL3-L5-VL4-L6-VH4-L7-VH3-Fc; VH3-L5-VH4-L6-VL4-L7-VL3-Fc; VL3-L5-VL4-L6-VH4-L7-VH3-L8-Fc; VH3-L5-VH4-L6-VL4-L7-VL3-L8-Fc; VL3-VL4-VH4-VH3-CH1; VH3-VH4-VL4-VL3-CH1; VL3-VL4-VH4-VH3-CL; VH3-VH4-VL4-VL3-CL; VL3-VL4-VH4-VH3-CH1-CL; VH3-VH4-VL4-VL3-CH1-CL; VL3-VL4-VH4-VH3-CL-CH1; VH3-VH4-VL4-VL3-CL-CH1; VL3-L6-VL4-L7-VH4-L8-VH3-L9-CH1; VH3-L6-VH4-L7-VL4-L8-VL3-L9-CH1; VL3-L6-VL4-L7-VH4-L8-VH3-L9-CL; VH3-L6- VH4-L7-VL4-L8-VL3-L9-CL; VL3-L6-VL4-L7-VH4-L8-VH3-L9-CH1-L10-CL; VH3-L6-VH4-L7-VL4-L8-VL3-L9-CH1- L10-CL; VL3-L6-VL4-L7-VH4-L8-VH3-L9-CL-L10-CH1; VH3-L6-VH4-L7-VL4-L8-VL3-L9-CL-L10-CH1; VL3-VL4-VH4-VH3-CH1-Fc; VH3-VH4-VL4-VL3-CH1-Fc; VL3-VL4-VH4-VH3-CL-Fc; VH3-VH4-VL4-VL3-CL-Fc; VL3-VL4-VH4-VH3-CH1-CL-Fc; VH3-VH4-VL4-VL3-CH1-CL-Fc; VL3-VL4-VH4-VH3-CL-CH1-Fc; VH3-VH4-VL4-VL3-CL-CH1-Fc; VL3-L6-VL4-L7-VH4-L8-VH3-L9-CH1-Fc; VH3-L6-VH4-L7-VL4-L8-VL3-L9-CH1-Fc; VL3-L6-VL4-L7-VH4-L8-VH3-L9-CL-Fc; VH3-L6-VH4-L7-VL4-L8-VL3-L9-CL-Fc; VL3-L6-VL4-L7-VH4-L8-VH3-L9-CH1-L10-CL-Fc; VH3-L6-VH4-L7-VL4-L8-VL3-L9-CH1-L10-CL-Fc; VL3-L6-VL4-L7-VH4-L8-VH3-L9-CL-L10-CH1-Fc; or VH3-L6-VH4-L7-VL4-L8-VL3-L9-CL-L10-CH1-Fc. In some aspects, the first polypeptide has a structure represented by VL1-VL2-VH2-VH1-CL-CH1-Fc, and the second polypeptide has a structure represented by VL3-VL4-VH4-VH3; VH3-VH4-VL4-VL3; VL3-L4-VL4-L5-VH4-L6-VH3; VH3-L4-VH4-L5-VL4-L6-VL3; VL3-VL4-VH4-VH3-Fc; VH3-VH4-VL4-VL3-Fc; VL3-L5-VL4-L6-VH4-L7-VH3-Fc; VH3-L5-VH4-L6-VL4-L7-VL3-Fc; VL3-L5-VL4-L6-VH4-L7-VH3-L8-Fe; VH3-L5-VH4-L6-VL4-L7-VL3-L8-Fc; VL3-VL4-VH4-VH3-CH1; VH3-VH4-VL4-VL3-CH1; VL3-VL4-VH4-VH3-CL; VH3-VH4-VL4-VL3-CL; VL3-VL4-VH4-VH3-CH1-CL; VH3-VH4-VL4-VL3-CH1-CL; VL3-VL4-VH4-VH3-CL-CH1; VH3-VH4-VL4-VL3-CL-CH1; VL3-L6-VL4-L7-VH4-L8-VH3-L9-CH1; VH3-L6-VH4-L7-VL4-L8-VL3-L9-CH1; VL3-L6-VL4-L7-VH4-L8-VH3-L9-CL; VH3-L6-VH4-L7-VL4-L8-VL3-L9-CL; VL3-L6-VL4-L7-VH4-L8-VH3-L9-CH1-L10-CL; VH3-L6-VH4-L7-VL4-L8-VL3-L9-CH1-L10-CL; VL3-L6-VL4-L7-VH4-L8-VH3-L9-CL-L10-CH1; VH3-L6-VH4-L7-VL4-L8-VL3-L9-CL-L10-CH1; VL3-VL4-VH4-VH3-CH1-Fc; VH3-VH4-VL4-VL3-CH1-Fc; VL3-VL4-VH4-VH3-CL-Fc; VH3-VH4-VL4-VL3-CL-Fc; VL3-VL4-VH4-VH3-CH1-CL-Fc; VH3-VH4-VL4-VL3-CH1-CL-Fc; VL3-VL4-VH4-VH3-CL-CH1-Fc; VH3-VH4-VL4-VL3-CL-CH1-Fc; VL3-L6-VL4-L7-VH4-L8-VH3-L9-CH1-Fc; VH3-L6-VH4-L7-VL4-L8-VL3-L9-CH1-Fc; VL3-L6-VL4-L7-VH4-L8-VH3-L9-CL-Fc; VH3-L6-VH4-L7-VL4-L8-VL3-L9-CL-Fc; VL3-L6-VL4-L7-VH4-L8-VH3-L9-CH1-L10-CL-Fc; VH3-L6-VH4-L7-VL4-L8-VL3-L9-CH1-L10-CL-Fc; VL3-L6-VL4-L7-VH4-L8-VH3-L9-CL-L10-CH1-Fc; or VH3-L6-VH4-L7-VL4-L8-VL3-L9-CL-L10-CH1-Fc. In some aspects, the first polypeptide has a structure represented by VH1-VH2-VL2-VL1-CL-CH1-Fc, and the second polypeptide has a structure represented by VL3-VL4-VH4-VH3; VH3-VH4-VL4-VL3; VL3-L4-VL4-L5-VH4-L6-VH3; VH3-L4-VH4-L5-VL4-L6-VL3; VL3-VL4-VH4-VH3-Fc; VH3-VH4-VL4-VL3-Fe; VL3-L5-VL4-L6-VH4-L7-VH3-Fc; VH3-L5-VH4-L6-VL4-L7-VL3-Fc; VL3-L5-VL4-L6-VH4-L7-VH3-L8-Fc; VH3-L5-VH4-L6-VL4-L7-VL3-L8-Fc; VL3-VL4-VH4-VH3-CH1; VH3-VH4-VL4-VL3-CH1; VL3-VL4-VH4-VH3-CL; VH3-VH4-VL4-VL3-CL; VL3-VL4-VH4-VH3-CH1-CL; VH3-VH4-VL4-VL3-CH1-CL; VL3-VL4-VH4-VH3-CL-CH1; VH3-VH4-VL4-VL3-CL-CH1; VL3-L6-VL4-L7-VH4-L8-VH3-L9-CH1; VH3-L6-VH4-L7-VL4-L8-VL3-L9-CH1; VL3-L6-VL4-L7-VH4-L8-VH3-L9-CL; VH3-L6-VH4-L7-VL4-L8-VL3-L9-CL; VL3-L6-VL4- L7-VH4-L8-VH3-L9-CH1-L10-CL; VH3-L6-VH4-L7-VL4-L8-VL3-L9-CH1-L10-CL; VL3-L6-VL4-L7-VH4-L8-VH3-L9-CL-L10-CH1; VH3-L6-VH4-L7-VL4-L8-VL3-L9-CL-L10-CH1; VL3-VL4-VH4-VH3-CH1-Fc; VH3-VH4-VL4-VL3-CH1-Fc; VL3-VL4-VH4-VH3-CL-Fc; VH3-VH4-VL4-VL3-CL-Fc; VL3-VL4-VH4-VH3-CH1-CL-Fc; VH3-VH4-VL4-VL3-CH1-CL-Fc; VL3-VL4-VH4-VH3-CL-CH1-Fc; VH3-VH4-VL4-VL3-CL-CH1-Fc; VL3-L6-VL4-L7-VH4-L8-VH3-L9-CH1-Fc; VH3-L6-VH4-L7-VL4-L8-VL3-L9-CH1-Fc; VL3-L6-VL4-L7-VH4-L8-VH3-L9-CL-Fc; VH3-L6-VH4-L7-VL4-L8-VL3-L9-CL-Fc; VL3-L6-VL4-L7-VH4-L8-VH3-L9-CH1-L10-CL-Fc; VH3-L6-VH4-L7-VL4-L8-VL3-L9-CH1-L10-CL-Fc; VL3-L6-VL4-L7-VH4-L8-VH3-L9-CL-L10-CH1-Fc; or VH3-L6-VH4-L7-VL4-L8-VL3-L9-CL-L10-CH1-Fc. In some aspects, the first polypeptide has a structure represented by VL1-L1-VL2-L2-VH2-L3-VH1-L4-CH1-Fc, and the second polypeptide has a structure represented by VL3-VL4-VH4-VH3; VH3-VH4-VL4-VL3; VL3-L4-VL4-L5-VH4-L6-VH3; VH3-L4-VH4-L5-VL4-L6-VL3; VL3-VL4-VH4-VH3-Fc; VH3-VH4-VL4-VL3-Fc; VL3-L5-VL4-L6-VH4-L7-VH3-Fc; VH3-L5-VH4-L6-VL4-L7-VL3-Fc; VL3-L5-VL4-L6-VH4-L7-VH3-L8-Fc; VH3-L5-VH4-L6-VL4-L7-VL3-L8-Fc; VL3-VL4-VH4-VH3-CH1; VH3-VH4-VL4-VL3-CH1; VL3-VL4-VH4-VH3-CL; VH3-VH4-VL4-VL3-CL; VL3-VL4-VH4-VH3-CH1-CL; VH3-VH4-VL4-VL3-CH1-CL; VL3-VL4-VH4-VH3-CL-CH1; VH3-VH4-VL4-VL3-CL-CH1; VL3-L6-VL4-L7-VH4-L8-VH3-L9-CH1; VH3-L6-VH4-L7-VL4-L8-VL3-L9-CH1; VL3-L6-VL4-L7-VH4-L8-VH3-L9-CL; VH3-L6-VH4-L7-VL4-L8-VL3-L9-CL; VL3-L6-VL4-L7- VH4-L8-VH3-L9-CH1-L10-CL; VH3-L6-VH4-L7-VL4-L8-VL3-L9-CH1-L10-CL; VL3-L6-VL4-L7-VH4-L8-VH3-L9- CL-L10-CH1; VH3-L6-VH4-L7-VL4-L8-VL3-L9-CL-L10-CH1; VL3-VL4-VH4-VH3-CH1-Fc; VH3-VH4-VL4-VL3-CH1-Fc; VL3-VL4-VH4-VH3-CL-Fc; VH3-VH4-VL4-VL3-CL-Fc; VL3-VL4-VH4-VH3-CH1-CL-Fc; VH3-VH4-VL4-VL3-CH1-CL-Fc; VL3-VL4-VH4-VH3-CL-CH1-Fc; VH3-VH4-VL4-VL3-CL-CH1-Fc; VL3-L6-VL4-L7-VH4-L8-VH3-L9-CH1-Fc; VH3-L6-VH4-L7-VL4-L8-VL3-L9-CH1-Fc; VL3-L6-VL4-L7-VH4-L8-VH3-L9-CL-Fc; VH3-L6-VH4-L7-VL4-L8-VL3-L9-CL-Fc; VL3-L6-VL4-L7-VH4-L8-VH3-L9-CH1-L10-CL-Fc; VH3-L6-VH4-L7-VL4-L8-VL3-L9-CH1-L10-CL-Fc; VL3-L6-VL4-L7-VH4-L8-VH3-L9-CL-L10-CH1-Fc; or VH3-L6-VH4-L7-VL4-L8-VL3-L9-CL-L10-CH1-Fc. In some aspects, the first polypeptide has a structure represented by VH1-L1-VH2-L2-VL2-L3-VL1-L4-CH1-Fc, and the second polypeptide has a structure represented by VL3-VL4-VH4-VH3; VH3-VH4-VL4-VL3; VL3-L4-VL4-L5-VH4-L6-VH3; VH3-L4-VH4-L5-VL4-L6-VL3; VL3-VL4-VH4-VH3-Fc; VH3-VH4-VL4-VL3-Fc; VL3-L5-VL4-L6-VH4-L7-VH3-Fc; VH3-L5-VH4-L6-VL4-L7-VL3-Fc; VL3-L5-VL4-L6-VH4-L7-VH3-L8-Fc; VH3-L5-VH4-L6-VL4-L7-VL3-L8-Fc; VL3-VL4-VH4-VH3-CH1; VH3-VH4-VL4-VL3-CH1; VL3-VL4-VH4-VH3-CL; VH3-VH4-VL4-VL3-CL; VL3-VL4-VH4-VH3-CH1-CL; VH3-VH4-VL4-VL3-CH1-CL; VL3-VL4-VH4-VH3-CL-CH1; VH3-VH4-VL4-VL3-CL-CH1; VL3-L6-VL4-L7-VH4-L8-VH3-L9-CH1; VH3-L6-VH4-L7-VL4-L8-VL3-L9-CH1; VL3-L6-VL4-L7-VH4-L8-VH3-L9-CL; VH3-L6-VH4-L7-VL4-L8-VL3-L9-CL; VL3-L6-VL4-L7-VH4-L8- VH3-L9-CH1-L10-CL; VH3-L6-VH4-L7-VL4-L8-VL3-L9-CH1-L10-CL; VL3-L6-VL4-L7-VH4-L8-VH3-L9-CL-L10-CH1; VH3-L6-VH4-L7-VL4-L8-VL3-L9-CL-L10-CH1; VL3-VL4-VH4-VH3-CH1-Fc; VH3-VH4-VL4-VL3-CH1-Fc; VL3-VL4-VH4-VH3-CL-Fc; VH3-VH4-VL4-VL3-CL-Fc; VL3-VL4-VH4-VH3-CH1-CL-Fc; VH3-VH4-VL4-VL3-CH1-CL-Fc; VL3-VL4-VH4-VH3-CL-CH1-Fc; VH3-VH4-VL4-VL3-CL-CH1-Fc; VL3-L6-VL4-L7-VH4-L8-VH3-L9-CH1-Fc; VH3-L6-VH4-L7-VL4-L8-VL3-L9-CH1-Fc; VL3-L6-VL4-L7-VH4-L8-VH3-L9-CL-Fc; VH3-L6-VH4-L7-VL4-L8-VL3-L9-CL-Fc; VL3-L6-VL4-L7-VH4-L8-VH3-L9-CH1-L10-CL-Fc; VH3-L6-VH4-L7-VL4-L8-VL3-L9-CH1-L10-CL-Fc; VL3-L6-VL4-L7-VH4-L8-VH3-L9-CL-L10-CH1-Fc; or VH3-L6-VH4-L7-VL4-L8-VL3-L9-CL-L10-CH1-Fc. In some aspects, the first polypeptide has a structure represented by VL1-L1-VL2-L2-VH2-L3-VH1-L4-CL-Fc, and the second polypeptide has a structure represented by VL3-VL4-VH4-VH3; VH3-VH4-VL4-VL3; VL3-L4-VL4-L5-VH4-L6-VH3; VH3-L4-VH4-L5-VL4-L6-VL3; VL3-VL4-VH4-VH3-Fc; VH3-VH4-VL4-VL3-Fc; VL3-L5-VL4-L6-VH4-L7-VH3-Fc; VH3-L5-VH4-L6-VL4-L7-VL3-Fc; VL3-L5-VL4-L6-VH4-L7-VH3-L8-Fc; VH3-L5-VH4-L6-VL4-L7-VL3-L8-Fc; VL3-VL4-VH4-VH3-CH1; VH3-VH4-VL4-VL3-CH1; VL3-VL4-VH4-VH3-CL; VH3-VH4-VL4-VL3-CL; VL3-VL4-VH4-VH3-CH1-CL; VH3-VH4-VL4-VL3-CH1-CL; VL3-VL4-VH4-VH3-CL-CH1; VH3-VH4-VL4-VL3-CL-CH1; VL3-L6-VL4-L7-VH4-L8-VH3-L9-CH1; VH3-L6-VH4-L7-VL4-L8-VL3-L9-CH1; VL3-L6- VL4-L7-VH4-L8-VH3-L9-CL; VH3-L6-VH4-L7-VL4-L8-VL3-L9-CL; VL3-L6-VL4-L7-VH4-L8-VH3-L9-CH1-L10- CL; VH3-L6-VH4-L7-VL4-L8-VL3-L9-CH1-L10-CL; VL3-L6-VL4-L7-VH4-L8-VH3-L9-CL-L10-CH1; VH3-L6-VH4-L7-VL4-L8-VL3-L9-CL-L10-CH1; VL3-VL4-VH4-VH3-CH1-Fc; VH3-VH4-VL4-VL3-CH1-Fc; VL3-VL4-VH4-VH3-CL-Fc; VH3-VH4-VL4-VL3-CL-Fc; VL3-VL4-VH4-VH3-CH1-CL-Fc; VH3-VH4-VL4-VL3-CH1-CL-Fc; VL3-VL4-VH4-VH3-CL-CH1-Fc; VH3-VH4-VL4-VL3-CL-CH1-Fc; VL3-L6-VL4-L7-VH4-L8-VH3-L9-CH1-Fc; VH3-L6-VH4-L7-VL4-L8-VL3-L9-CH1-Fc; VL3-L6-VL4-L7-VH4-L8-VH3-L9-CL-Fc; VH3-L6-VH4-L7-VL4-L8-VL3-L9-CL-Fc; VL3-L6-VL4-L7-VH4-L8-VH3-L9-CH1-L10-CL-Fc; VH3-L6-VH4-L7-VL4-L8-VL3-L9-CH1-L10-CL-Fc; VL3-L6-VL4-L7-VH4-L8-VH3-L9-CL-L10-CH1-Fc; or VH3-L6-VH4-L7-VL4-L8-VL3-L9-CL-L10-CH1-Fc. In some aspects, the first polypeptide has a structure represented by VH1-L1-VH2-L2-VL2-L3-VL1-L4-CL-Fc, and the second polypeptide has a structure represented by VL3-VL4-VH4-VH3; VH3-VH4-VL4-VL3; VL3-L4-VL4-L5-VH4-L6-VH3; VH3-L4-VH4-L5-VL4-L6-VL3; VL3-VL4-VH4-VH3-Fc; VH3-VH4-VL4-VL3-Fc; VL3-L5-VL4-L6-VH4-L7-VH3-Fc; VH3-L5-VH4-L6-VL4-L7-VL3-Fc; VL3-L5-VL4-L6-VH4-L7-VH3-L8-Fc; VH3-L5-VH4-L6-VL4-L7-VL3-L8-Fc; VL3-VL4-VH4-VH3-CH1; VH3-VH4-VL4-VL3-CH1; VL3-VL4-VH4-VH3-CL; VH3-VH4-VL4-VL3-CL; VL3-VL4-VH4-VH3-CH1-CL; VH3-VH4-VL4-VL3-CH1-CL; VL3-VL4-VH4-VH3-CL-CH1; VH3-VH4-VL4-VL3-CL-CH1; VL3-L6-VL4-L7-VH4-L8-VH3-L9-CH1; VH3-L6-VH4-L7-VL4-L8-VL3-L9-CH1; VL3-L6-VL4-L7-VH4-L8-VH3-L9-CL; VH3-L6-VH4-L7-VL4-L8-VL3-L9-CL; VL3-L6-VL4-L7-VH4-L8-VH3-L9-CH1-L10-CL; VH3-L6-VH4-L7-VL4-L8-VL3-L9-CH1-L10-CL; VL3-L6-VL4-L7-VH4-L8-VH3-L9-CL-L10-CH1; VH3-L6-VH4-L7-VL4-L8-VL3-L9-CL-L10-CH1; VL3-VL4-VH4-VH3-CH1-Fc; VH3-VH4-VL4-VL3-CH1-Fc; VL3-VL4-VH4-VH3-CL-Fc; VH3-VH4-VL4-VL3-CL-Fc; VL3-VL4-VH4-VH3-CH1-CL-Fc; VH3-VH4-VL4-VL3-CH1-CL-Fc; VL3-VL4-VH4-VH3-CL-CH1-Fc; VH3-VH4-VL4-VL3-CL-CH1-Fc; VL3-L6-VL4-L7-VH4-L8-VH3-L9-CH1-Fc; VH3-L6-VH4-L7-VL4-L8-VL3-L9-CH1-Fc; VL3-L6-VL4-L7-VH4-L8-VH3-L9-CL-Fc; VH3-L6-VH4-L7-VL4-L8-VL3-L9-CL-Fc; VL3-L6-VL4-L7-VH4-L8-VH3-L9-CH1-L10-CL-Fc; VH3-L6-VH4-L7-VL4-L8-VL3-L9-CH1-L10-CL-Fc; VL3-L6-VL4-L7-VH4-L8-VH3-L9-CL-L10-CH1-Fc; or VH3-L6-VH4-L7-VL4-L8-VL3-L9-CL-L10-CH1-F c. In some aspects, the first polypeptide has a structure represented by VL1-L1-VL2-L2-VH2-L3-VH1-L4-CH1-L5-CL-Fc, and the second polypeptide has a structure represented by VL3-VL4-VH4-VH3; VH3-VH4-VL4-VL3; VL3-L4-VL4-L5-VH4-L6-VH3; VH3-L4-VH4-L5-VL4-L6-VL3; VL3-VL4-VH4-VH3-Fc; VH3-VH4-VL4-VL3-Fc; VL3-L5-VL4-L6-VH4-L7-VH3-Fc; VH3-L5-VH4-L6-VL4-L7-VL3-Fc; VL3-L5-VL4-L6-VH4-L7-VH3-L8-Fc; VH3-L5-VH4-L6-VL4-L7-VL3-L8-Fc; VL3-VL4-VH4-VH3-CH1; VH3-VH4-VL4-VL3-CH1; VL3-VL4-VH4-VH3-CL; VH3-VH4-VL4-VL3-CL; VL3-VL4-VH4-VH3-CH1-CL; VH3-VH4-VL4-VL3-CH1-CL; VL3-VL4-VH4-VH3-CL-CH1; VH3-VH4-VL4-VL3-CL-CH1; VL3-L6-VL4-L7-VH4-L8-VH3-L9-CH1; VH3-L6-VH4-L7-VL4-L8-VL3-L9-CH1; VL3-L6-VL4-L7-VH4-L8-VH3-L9-CL; VH3-L6-VH4-L7-VL4-L8-VL3-L9-CL; VL3-L6-VL4-L7-VH4-L8-VH3-L9-CH1-L10-CL; VH3-L6-VH4-L7-VL4-L8-VL3-L9-CH1-L10-CL; VL3-L6-VL4-L7-VH4-L8-VH3-L9-CL-L10-CH1; VH3-L6-VH4-L7-VL4-L8-VL3-L9-CL-L10-CH1; VL3-VL4-VH4-VH3-CH1-Fc; VH3-VH4-VL4-VL3-CH1-Fc; VL3-VL4-VH4-VH3-CL-Fc; VH3-VH4-VL4-VL3-CL-Fc; VL3-VL4-VH4-VH3-CH1-CL-Fc; VH3-VH4-VL4-VL3-CH1-CL-Fc; VL3-VL4-VH4-VH3-CL-CH1-Fc; VH3-VH4-VL4-VL3-CL-CH1-Fc; VL3-L6-VL4-L7-VH4-L8-VH3-L9-CH1-Fc; VH3-L6-VH4-L7-VL4-L8-VL3-L9-CH1-Fc; VL3-L6-VL4-L7-VH4-L8-VH3-L9-CL-Fc; VH3-L6-VH4-L7-VL4-L8-VL3-L9-CL-Fc; VL3-L6-VL4-L7-VH4-L8-VH3-L9-CH1-L10-CL-Fc; VH3-L6-VH4-L7-VL4-L8-VL3-L9-CH1-L10-CL-Fc; VL3-L6-VL4-L7-VH4-L8-VH3-L9-CL-L10-CH1-Fc; or VH3-L6-VH4-L7-VL4-L8-VL3-L9-CL-L10-CH1-F c. In some aspects, the first polypeptide has a structure represented by VH1-L1-VH2-L2-VL2-L3-VL1-L4-CH1-L5-CL-Fc, and the second polypeptide has a structure represented by VL3-VL4-VH4-VH3; VH3-VH4-VL4-VL3; VL3-L4-VL4-L5-VH4-L6-VH3; VH3-L4-VH4-L5-VL4-L6-VL3; VL3-VL4-VH4-VH3-Fc; VH3-VH4-VL4-VL3-Fc; VL3-L5-VL4-L6-VH4-L7-VH3-Fc; VH3-L5-VH4-L6-VL4-L7-VL3-Fc; VL3-L5-VL4-L6-VH4-L7-VH3-L8-Fc; VH3-L5-VH4-L6-VL4-L7-VL3-L8-Fc; VL3-VL4-VH4-VH3-CH1; VH3-VH4-VL4-VL3-CH1; VL3-VL4-VH4-VH3-CL; VH3-VH4-VL4-VL3-CL; VL3-VL4-VH4-VH3-CH1-CL; VH3-VH4-VL4-VL3-CH1-CL; VL3-VL4-VH4-VH3-CL-CH1; VH3-VH4-VL4-VL3-CL-CH1; VL3-L6-VL4-L7-VH4-L8-VH3-L9-CH1; VH3-L6-VH4-L7-VL4-L8-VL3-L9-CH1; VL3-L6-VL4-L7-VH4-L8-VH3-L9-CL; VH3-L6-VH4-L7-VL4-L8-VL3-L9-CL; VL3-L6-VL4-L7-VH4-L8-VH3-L9-CH1-L10-CL; VH3-L6-VH4-L7-VL4-L8-VL3-L9-CH1-L10-CL; VL3-L6-VL4-L7-VH4-L8-VH3-L9-CL-L10-CH1; VH3-L6-VH4-L7-VL4-L8-VL3-L9-CL-L10-CH1; VL3-VL4-VH4-VH3-CH1-Fc; VH3-VH4-VL4-VL3-CH1-Fc; VL3-VL4-VH4-VH3-CL-Fc; VH3-VH4-VL4-VL3-CL-Fc; VL3-VL4-VH4-VH3-CH1-CL-Fc; VH3-VH4-VL4-VL3-CH1-CL-Fc; VL3-VL4-VH4-VH3-CL-CH1-Fc; VH3-VH4-VL4-VL3-CL-CH1-Fc; VL3-L6-VL4-L7-VH4-L8-VH3-L9-CH1-Fc; VH3-L6-VH4-L7-VL4-L8-VL3-L9-CH1-Fc; VL3-L6-VL4-L7-VH4-L8-VH3-L9-CL-Fc; VH3-L6-VH4-L7-VL4-L8-VL3-L9-CL-Fc; VL3-L6-VL4-L7-VH4-L8-VH3-L9-CH1-L10-CL-Fc; VH3-L6-VH4-L7-VL4-L8-VL3-L9-CH1-L10-CL-Fc; VL3-L6-VL4-L7-VH4-L8-VH3-L9-CL-L10-CH1-Fc; or VH3-L6-VH4-L7-VL4-L8-VL3-L9-CL-L10-CH1-F c. In some aspects, the first polypeptide has a structure represented by VL1-L1-VL2-L2-VH2-L3-VH1-L4-CL-L5-CH1-Fc, and the second polypeptide has a structure represented by VL3-VL4-VH4-VH3; VH3-VH4-VL4-VL3; VL3-L4-VL4-L5-VH4-L6-VH3; VH3-L4-VH4-L5-VL4-L6-VL3; VL3-VL4-VH4-VH3-Fc; VH3-VH4-VL4-VL3-Fc; VL3-L5-VL4-L6-VH4-L7-VH3-Fc; VH3-L5-VH4-L6-VL4-L7-VL3-Fc; VL3-L5-VL4-L6-VH4-L7-VH3-L8-Fc; VH3-L5-VH4-L6-VL4-L7-VL3-L8-Fc; VL3-VL4-VH4-VH3-CH1; VH3-VH4-VL4-VL3-CH1; VL3-VL4-VH4-VH3-CL; VH3-VH4-VL4-VL3-CL; VL3-VL4-VH4-VH3-CH1-CL; VH3-VH4-VL4-VL3-CH1-CL; VL3-VL4-VH4-VH3-CL-CH1; VH3-VH4-VL4-VL3-CL-CH1; VL3-L6-VL4-L7-VH4-L8-VH3-L9-CH1; VH3-L6-VH4-L7-VL4-L8-VL3-L9-CH1; VL3-L6-VL4-L7-VH4-L8-VH3-L9-CL; VH3-L6-VH4-L7-VL4-L8-VL3-L9-CL; VL3-L6-VL4-L7-VH4-L8-VH3-L9-CH1-L10-CL; VH3-L6-VH4-L7-VL4-L8-VL3-L9-CH1-L10-CL; VL3-L6-VL4-L7-VH4-L8-VH3-L9-CL-L10-CH1; VH3-L6-VH4-L7-VL4-L8-VL3-L9-CL-L10-CH1; VL3-VL4-VH4-VH3-CH1-Fc; VH3-VH4-VL4-VL3-CH1-Fc; VL3-VL4-VH4-VH3-CL-Fc; VH3-VH4-VL4-VL3-CL-Fc; VL3-VL4-VH4-VH3-CH1-CL-Fc; VH3-VH4-VL4-VL3-CH1-CL-Fc; VL3-VL4-VH4-VH3-CL-CH1-Fc; VH3-VH4-VL4-VL3-CL-CH1-Fc; VL3-L6-VL4-L7-VH4-L8-VH3-L9-CH1-Fc; VH3-L6-VH4-L7-VL4-L8-VL3-L9-CH1-Fc; VL3-L6-VL4-L7-VH4-L8-VH3-L9-CL-Fc; VH3-L6-VH4-L7-VL4-L8-VL3-L9-CL-Fc; VL3-L6-VL4-L7-VH4-L8-VH3-L9-CH1-L10-CL-Fc; VH3-L6-VH4-L7-VL4-L8-VL3-L9-CH1-L10-CL-Fc; VL3-L6-VL4-L7-VH4-L8-VH3-L9-CL-L10-CH1-Fc; or VH3-L6-VH4-L7-VL4-L8-VL3-L9-CL-L10-CH1-F c. In some aspects, the first polypeptide has a structure represented by VH1-L1-VH2-L2-VL2-L3-VL1-L4-CL-L5-CH1-Fc, and the second polypeptide has a structure represented by VL3-VL4-VH4-VH3; VH3-VH4-VL4-VL3; VL3-L4-VL4-L5-VH4-L6-VH3; VH3-L4-VH4-L5-VL4-L6-VL3; VL3-VL4-VH4-VH3-Fc; VH3-VH4-VL4-VL3-Fc; VL3-L5-VL4-L6-VH4-L7-VH3-Fc; VH3-L5-VH4-L6-VL4-L7-VL3-Fc; VL3-L5-VL4-L6-VH4-L7-VH3-L8-Fc; VH3-L5-VH4-L6-VL4-L7-VL3-L8-Fc; VL3-VL4-VH4-VH3-CH1; VH3-VH4-VL4-VL3-CH1; VL3-VL4-VH4-VH3-CL; VH3-VH4-VL4-VL3-CL; VL3-VL4-VH4-VH3-CH1-CL; VH3-VH4-VL4-VL3-CH1-CL; VL3-VL4-VH4-VH3-CL-CH1; VH3-VH4-VL4-VL3-CL-CH1; VL3-L6-VL4-L7-VH4-L8-VH3-L9-CH1; VH3-L6-VH4-L7-VL4-L8-VL3-L9-CH1; VL3-L6-VL4-L7-VH4-L8-VH3-L9-CL; VH3-L6-VH4-L7-VL4-L8-VL3-L9-CL; VL3-L6-VL4-L7-VH4-L8-VH3-L9-CH1-L10-CL; VH3-L6-VH4-L7-VL4-L8-VL3-L9-CH1-L10-CL; VL3-L6-VL4-L7-VH4-L8-VH3-L9-CL-L10-CH1; VH3-L6-VH4-L7-VL4-L8-VL3-L9-CL-L10-CH1; VL3-VL4-VH4-VH3-CH1-Fc; VH3-VH4-VL4-VL3-CH1-Fc; VL3-VL4-VH4-VH3-CL-Fc; VH3-VH4-VL4-VL3-CL-Fc; VL3-VL4-VH4-VH3-CH1-CL-Fc; VH3-VH4-VL4-VL3-CH1-CL-Fc; VL3-VL4-VH4-VH3-CL-CH1-Fc; VH3-VH4-VL4-VL3-CL-CH1-Fc; VL3-L6-VL4-L7-VH4-L8-VH3-L9-CH1-Fc; VH3-L6-VH4-L7-VL4-L8-VL3-L9-CH1-Fc; VL3-L6-VL4-L7-VH4-L8-VH3-L9-CL-Fc; VH3-L6-VH4-L7-VL4-L8-VL3-L9-CL-Fc; VL3-L6-VL4-L7-VH4-L8-VH3-L9-CH1-L10-CL-Fc; VH3-L6-VH4-L7-VL4-L8-VL3-L9-CH1-L10-CL-Fc; VL3-L6-VL4-L7-VH4-L8-VH3-L9-CL-L10-CH1-Fc; or VH3-L6-VH4-L7-VL4-L8-VL3-L9-CL-L10-CH1-Fc. In some aspects, the VL1, VL2, VL3, and/or VL4, specifically binds to human CD3, CD19, CD28, CD38 or Her2. In some aspects, the VH1, VH2, VH3 and/or VH4 specifically binds to A2AR, APRIL, ATPDase, BAFF, BAFFR, BCMA, BlyS, BTK, BTLA, B7DC, B7H1, B7H2, B7H3, B7H4, B7H5, B7H6, B7H7, B7RP1, B7-4, C3, C5, CCL2, CCL3, CCL4, CCL5, CCL7, CCL8, CCL11, CCL15, CCL17, CCL19, CCL20, CCL21, CCL25 CCR3, CCR4, CD3, CD16A, CD19, CD20, CD24, CD27, CD28, CD30, CD38, CD39, CD40, CD40L, CD47, CD52, CD70, CD80, CD86, CD123, CD133, CD137, CD137L, CD160, CD272, CEACAM5, CLEC9, CLEC91, CRTH2, CSF-1, CSF-2, CSF-3, CXCL1, CXCL2, CXCL4, CXCL12, CXCL13, CXCR3, cMet, CTLA4, DLL3, DLL4, DNGR-1, E-cadherin, EGFR, ENTPD1, EpCAM, FCER1, FCER1A, FCER2, FGFR, FLAP, FOLH1, Gi24, GITR, GITRL, GPR5, GP100, GPRC5D, HER2, HER3, ICOSL, ICOS, HHLA2, HMGB1, HVEM, IDO, IFNa, IgE, IGF1R, IL2Rbeta, IL1, ILIA, IL1B, IL1F10, IL2, IL4, IL4Ra, IL5, IL5R, IL6, IL7, IL7Ra, IL8, IL9, IL9R, IL10, rhIL1O, IL12, IL13, IL13Ra1, IL13Ra2, IL15, IL17, IL17Rb, IL18, IL22, IL23, IL25, IL7, IL33, IL35, ITGB4, ITK, KIR, LAG3, LAMP1, leptin, LPFS2, MHC class II, MUC-1, MUC-16, NCR3LG1, NKG2D, NKp46, NTPDase-1, OX40, OX40L, PD-1, PD-L1, PD-L2, PROM1, S152, SIRPalpha, SISP1, SLC, SPG64, ST2, STEAP1, STEAP2, Syk kinase, STEAP1, TROP2, TACI, TDO, TGFBETA, T14, TIGIT, TIM3, TLR, TLR2, TLR4, TLR5, TLR9, TMEF1, TNFa, TNFRSF7, Tp55, TREM1, TSLP, TSLPR, TWEAK, VEGF, VISTA, Vstm3, or WUCAM. In some aspects, the VL1, VL2, VL3, VL4, VH1, VH2, VH3 and/or VH4 specifically binds to A2AR, APRIL, ATPDase, BAFF, BAFFR, BCMA, BlyS, BTK, BTLA, B7DC, B7H1, B7H2, B7H3, B7H4, B7H5, B7H6, B7H7, B7RP1, B7-4, C3, C5, CCL2, CCL3, CCL4, CCL5, CCL7, CCL8, CCL11, CCL15, CCL17, CCL19, CCL20, CCL21, CCL25 CCR3, CCR4, CD3, CD16A, CD19, CD20, CD24, CD27, CD28, CD30, CD38, CD39, CD40, CD40L, CD47, CD52, CD70, CD80, CD86, CD123, CD133, CD137, CD137L, CD160, CD272, CEACAM5, CLEC9, CLEC91, CRTH2, CSF-1, CSF-2, CSF-3, CXCL1, CXCL2, CXCL4, CXCL12, CXCL13, CXCR3, cMet, CTLA4, DLL3, DLL4, DNGR-1, E-cadherin, EGFR, ENTPD1, EpCAM, FCER1, FCER1A, FCER2, FGFR, FLAP, FOLH1, Gi24, GITR, GITRL, GPR5, GP100, GPRC5D, HER2, HER3, ICOSL, ICOS, HHLA2, HMGB1, HVEM, IDO, IFNa, IgE, IGF1R, IL2Rbeta, IL1, ILIA, IL1B, IL1F10, IL2, IL4, IL4Ra, IL5, IL5R, IL6, IL7, IL7Ra, IL8, IL9, IL9R, IL10, rhIL1O, IL12, IL13, IL13Ra1, IL13Ra2, IL15, IL17, IL17Rb, IL18, IL22, IL23, IL25, IL7, IL33, IL35, ITGB4, ITK, KIR, LAG3, LAMP1, leptin, LPFS2, MHC class II, MUC-1, MUC-16, NCR3LG1, NKG2D, NKp46, NTPDase-1, OX40, OX40L, PD-1, PD-L1, PD-L2, PROM1, S152, SIRPalpha, SISP1, SLC, SPG64, ST2, STEAP1, STEAP2, Syk kinase, STEAP1, TROP2, TACI, TDO, TGFBETA, T14, TIGIT, TIM3, TLR, TLR2, TLR4, TLR5, TLR9, TMEF1, TNFa, TNFRSF7, Tp55, TREM1, TSLP, TSLPR, TWEAK, VEGF, VISTA, Vstm3, or WUCAM. Any and all disclosure herein in relation to targets for antigen binding polypeptides of the invention is generally applicable, and applies equally and without reservation to each and every antigen binding polypeptide and antigen binding polypeptide complex described herein. For the avoidance of doubt, the VL1, VL2, VL3, VL4, VH1, VH2, VH3 and/or VH4 of each and every antigen binding polypeptide and antigen binding polypeptide complex described herein may independently bind to any one of said particularly preferred targets.

[0218] In some aspects, VH1 and VL1 specifically bind to human CD3; VH2 and VL2 specifically bind to human CD28; VH3 and VL3 specifically bind to human CD19; and VH4 and VL4 specifically bind to human CD38.

[0219] In some aspects, VH1 and VL1 specifically bind to human CD3; VH2 and VL2 specifically bind to human CD28; VH3 and VL3 specifically bind to human CD38; and VH4 and VL4 specifically bind to human CD19.

[0220] In some aspects, VH1 and VL1 specifically bind to human CD28; VH2 and VL2 specifically bind to human CD3; VH3 and VL3 specifically bind to human CD19; and VH4 and VL4 specifically bind to human CD38.

[0221] In some aspects, VH1 and VL1 specifically bind to human CD28; VH2 and VL2 specifically bind to human CD3; VH3 and VL3 specifically bind to human CD38; and VH4 and VL4 specifically bind to human CD19.

[0222] In some aspects, VH1 and VL1 specifically bind to human CD28; VH2 and VL2 specifically bind to human CD3; VH3 and VL3 specifically bind to human Trop2; and VH4 and VL4 specifically bind to human cMet.

[0223] In some aspects, VH1 and VL1 specifically bind to human CD28; VH2 and VL2 specifically bind to human CD3; VH3 and VL3 specifically bind to human cMet; and VH4 and VL4 specifically bind to human Trop2.

[0224] In some aspects, VH1 and VL1 specifically bind to human CD3; VH2 and VL2 specifically bind to human CD28; VH3 and VL3 specifically bind to human Trop2; and VH4 and VL4 specifically bind to human cMet.

[0225] In some aspects, VH1 and VL1 specifically bind to human CD3; VH2 and VL2 specifically bind to human CD28; VH3 and VL3 specifically bind to human cMet; and VH4 and VL4 specifically bind to human Trop2.

[0226] In some aspects, VH1 and VL1 specifically bind to human CD28; VH2 and VL2 specifically bind to human CD3; VH3 and VL3 specifically bind to human CD19; and VH4 and VL4 specifically bind to human CD20.

[0227] In some aspects, VH1 and VL1 specifically bind to human CD28; VH2 and VL2 specifically bind to human CD3; VH3 and VL3 specifically bind to human CD20; and VH4 and VL4 specifically bind to human CD19.

[0228] In some aspects, VH1 and VL1 specifically bind to human CD3; VH2 and VL2 specifically bind to human CD28; VH3 and VL3 specifically bind to human CD19; and VH4 and VL4 specifically bind to human CD20.

[0229] In some aspects, VH1 and VL1 specifically bind to human CD3; VH2 and VL2 specifically bind to human CD28; VH3 and VL3 specifically bind to human CD20; and VH4 and VL4 specifically bind to human CD19.

[0230] In other aspects, VH1 VH2, VH3 and VH4 each comprise an amino acid sequence having at least 90% identity, at least 95% identity, or 100% identity to any one of SEQ ID NOs:20-25 and 122; and VL1, VL2, VL3 and VL4 each comprise an amino acid sequence having at least 90% identity, at least 95% identity, or 100% identity to any one of SEQ ID NOs:26-31 and 123. For example, VH1 VH2, VH3 and VH4 may each comprise an amino acid sequence having at least 90% (such as at least 91%, 92%, 93%, 94%, 95%, 96%, 97%, 98%, or 99%) identity to any one of SEQ ID NOs:20-25 and 122; and VL1, VL2, VL3 and VL4 may each comprise an amino acid sequence having at least 90% (such as at least 91%, 92%, 93%, 94%, 95%, 96%, 97%, 98%, or 99%) identity to any one of SEQ ID NOs:26-31 and 123. For example, VH1 VH2, VH3 and VH4 may each comprise the amino acid sequence of any one of SEQ ID NOs:20-25 and 122; and VL1, VL2, VL3 and VL4 may each comprise the amino acid sequence of any one of SEQ ID NOs:26-31 and 123. In other aspects, VH1 VH2, VH3 and VH4 each comprise an amino acid sequence having at least 90% (such as at least 91%, 92%, 93%, 94%, 95%, 96%, 97%, 98%, or 99%) identity to any one of SEQ ID NOs:20-25; and VL1, VL2, VL3 and VL4 each comprise an amino acid sequence having at least 90% (such as at least 91%, 92%, 93%, 94%, 95%, 96%, 97%, 98%, or 99%) identity to any one of SEQ ID NOs:26-31. For example, VH1 VH2, VH3 and VH4 may each comprise the amino acid sequence of any one of SEQ ID NOs:20-25; and VL1, VL2, VL3 and VL4 may each comprise the amino acid sequence of any one of SEQ ID NOs:26-31.

[0231] In other aspects, VH1 comprises an amino acid sequence having at least 90% identity, at least 95% identity, or 100% identity SEQ ID NO:20; VH2 comprises an amino acid sequence having at least 90% identity, at least 95% identity, or 100% identity to SEQ ID NO:21; VH3 comprises an amino acid sequence having at least 90% identity, at least 95% identity, or 100% identity to SEQ ID NO:22; and VH4 comprises an amino acid sequence having at least 90% identity, at least 95% identity, or 100% identity to SEQ ID NO:23. For example, VH1 may comprise an amino acid sequence having at least 90% identity to SEQ ID NO:20; VH2 may comprise an amino acid sequence having at least 90% identity to SEQ ID NO:21; VH3 may comprise an amino acid sequence having at least 90% identity to SEQ ID NO:22; and VH4 may comprise an amino acid sequence having at least 90% identity to SEQ ID NO:23. At least 90% identity may include at least 91%, 92%, 93%, 94%, 95%, 96%, 97%, 98%, 99% or 100% identity to the reference polypeptide sequence. For example, VH1 may comprise the amino acid sequence of SEQ ID NO:20; VH2 may comprise the amino acid sequence of SEQ ID NO:21; VH3 may comprise the amino acid sequence of SEQ ID NO:22; and VH4 may comprise the amino acid sequence of SEQ ID NO:23.

[0232] In other aspects, VH1 comprises an amino acid sequence having at least 90% identity, at least 95% identity, or 100% identity SEQ ID NO:20; VH2 comprises an amino acid sequence having at least 90% identity, at least 95% identity, or 100% identity to SEQ ID NO:21; VH3 comprises an amino acid sequence having at least 90% identity, at least 95% identity, or 100% identity to SEQ ID NO:23; and VH4 comprises an amino acid sequence having at least 90% identity, at least 95% identity, or 100% identity to SEQ ID NO:22. For example, VH1 may comprise an amino acid sequence having at least 90% identity to SEQ ID NO:20; VH2 may comprise an amino acid sequence having at least 90% identity to SEQ ID NO:21; VH3 may comprise an amino acid sequence having at least 90% identity to SEQ ID NO:23; and VH4 may comprise an amino acid sequence having at least 90% identity to SEQ ID NO:22. At least 90% identity may include at least 91%, 92%, 93%, 94%, 95%, 96%, 97%, 98%, 99% or 100% identity to the reference polypeptide sequence. For example, VH1 may comprise the amino acid sequence of SEQ ID NO:20; VH2 may comprise the amino acid sequence of SEQ ID NO:21; VH3 may comprise the amino acid sequence of SEQ ID NO:23; and VH4 may comprise the amino acid sequence of SEQ ID NO:22.

[0233] In other aspects, VH1 comprises an amino acid sequence having at least 90% identity, at least 95% identity, or 100% identity SEQ ID NO:21; VH2 comprises an amino acid sequence having at least 90% identity, at least 95% identity, or 100% identity to SEQ ID NO:20; VH3 comprises an amino acid sequence having at least 90% identity, at least 95% identity, or 100% identity to SEQ ID NO:22; and VH4 comprises an amino acid sequence having at least 90% identity, at least 95% identity, or 100% identity to SEQ ID NO:23. For example, VH1 may comprise an amino acid sequence having at least 90% identity to SEQ ID NO:21; VH2 may comprise an amino acid sequence having at least 90% identity to SEQ ID NO:20; VH3 may comprise an amino acid sequence having at least 90% identity to SEQ ID NO:22; and VH4 may comprise an amino acid sequence having at least 90% identity to SEQ ID NO:23. At least 90% identity may include at least 91%, 92%, 93%, 94%, 95%, 96%, 97%, 98%, 99% or 100% identity to the reference polypeptide sequence. For example, VH1 may comprise the amino acid sequence of SEQ ID NO:21; VH2 may comprise the amino acid sequence of SEQ ID NO:20; VH3 may comprise the amino acid sequence of SEQ ID NO:22; and VH4 may comprise the amino acid sequence of SEQ ID NO:23.

[0234] In other aspects, VH1 comprises an amino acid sequence having at least 90% identity, at least 95% identity, or 100% identity SEQ ID NO:21; VH2 comprises an amino acid sequence having at least 90% identity, at least 95% identity, or 100% identity to SEQ ID NO:20; VH3 comprises an amino acid sequence having at least 90% identity, at least 95% identity, or 100% identity to SEQ ID NO:23; and VH4 comprises an amino acid sequence having at least 90% identity, at least 95% identity, or 100% identity to SEQ ID NO:22. For example, VH1 may comprise an amino acid sequence having at least 90% identity to SEQ ID NO:21; VH2 may comprise an amino acid sequence having at least 90% identity to SEQ ID NO:20; VH3 may comprise an amino acid sequence having at least 90% identity to SEQ ID NO:23; and VH4 may comprise an amino acid sequence having at least 90% identity to SEQ ID NO:22. At least 90% identity may include at least 91%, 92%, 93%, 94%, 95%, 96%, 97%, 98%, 99% or 100% identity to the reference polypeptide sequence. For example, VH1 may comprise the amino acid sequence of SEQ ID NO:21; VH2 may comprise the amino acid sequence of SEQ ID NO:20; VH3 may comprise the amino acid sequence of SEQ ID NO:23; and VH4 may comprise the amino acid sequence of SEQ ID NO:22.

[0235] In other aspects, VL1 comprises an amino acid sequence having at least 90% identity, at least 95% identity, or 100% identity SEQ ID NO:26; VL2 comprises an amino acid sequence having at least 90% identity, at least 95% identity, or 100% identity to SEQ ID NO:27; VL3 comprises an amino acid sequence having at least 90% identity, at least 95% identity, or 100% identity to SEQ ID NO:28; and VL4 comprises an amino acid sequence having at least 90% identity, at least 95% identity, or 100% identity to SEQ ID NO:29. For example, VL1 may comprise an amino acid sequence having at least 90% identity to SEQ ID NO:26; VL2 may comprise an amino acid sequence having at least 90% identity to SEQ ID NO:27; VL3 may comprise an amino acid sequence having at least 90% identity to SEQ ID NO:28; and VL4 may comprise an amino acid sequence having at least 90% identity to SEQ ID NO:29. At least 90% identity may include at least 91%, 92%, 93%, 94%, 95%, 96%, 97%, 98%, 99% or 100% identity to the reference polypeptide sequence. For example, VL1 may comprise the amino acid sequence of SEQ ID NO:26; VL2 may comprise the amino acid sequence of SEQ ID NO:27; VL3 may comprise the amino acid sequence of SEQ ID NO:28; and VL4 may comprise the amino acid sequence of SEQ ID NO:29.

[0236] In other aspects, VL1 comprises an amino acid sequence having at least 90% identity, at least 95% identity, or 100% identity SEQ ID NO:26; VL2 comprises an amino acid sequence having at least 90% identity, at least 95% identity, or 100% identity to SEQ ID NO:27; VL3 comprises an amino acid sequence having at least 90% identity, at least 95% identity, or 100% identity to SEQ ID NO:29; and VL4 comprises an amino acid sequence having at least 90% identity, at least 95% identity, or 100% identity to SEQ ID NO:28. For example, VL1 may comprise an amino acid sequence having at least 90% identity to SEQ ID NO:26; VL2 may comprise an amino acid sequence having at least 90% identity to SEQ ID NO:27; VL3 may comprise an amino acid sequence having at least 90% identity to SEQ ID NO:29; and VL4 may comprise an amino acid sequence having at least 90% identity to SEQ ID NO:28. At least 90% identity may include at least 91%, 92%, 93%, 94%, 95%, 96%, 97%, 98%, 99% or 100% identity to the reference polypeptide sequence. For example, VL1 may comprise the amino acid sequence of SEQ ID NO:26; VL2 may comprise the amino acid sequence of SEQ ID NO:27; VL3 may comprise the amino acid sequence of SEQ ID NO:29; and VL4 may comprise the amino acid sequence of SEQ ID NO:28.

[0237] In other aspects, VL1 comprises an amino acid sequence having at least 90% identity, at least 95% identity, or 100% identity SEQ ID NO:27; VL2 comprises an amino acid sequence having at least 90% identity, at least 95% identity, or 100% identity to SEQ ID NO:26; VL3 comprises an amino acid sequence having at least 90% identity, at least 95% identity, or 100% identity to SEQ ID NO:28; and VL4 comprises an amino acid sequence having at least 90% identity, at least 95% identity, or 100% identity to SEQ ID NO:29. For example, VL1 may comprise an amino acid sequence having at least 90% identity to SEQ ID NO:27; VL2 may comprise an amino acid sequence having at least 90% identity to SEQ ID NO:26; VL3 may comprise an amino acid sequence having at least 90% identity to SEQ ID NO:28; and VL4 may comprise an amino acid sequence having at least 90% identity to SEQ ID NO:29. At least 90% identity may include at least 91%, 92%, 93%, 94%, 95%, 96%, 97%, 98%, 99% or 100% identity to the reference polypeptide sequence. For example, VL1 may comprise the amino acid sequence of SEQ ID NO:27; VL2 may comprise the amino acid sequence of SEQ ID NO:26; VL3 may comprise the amino acid sequence of SEQ ID NO:28; and VL4 may comprise the amino acid sequence of SEQ ID NO:29.

[0238] In other aspects, VL1 comprises an amino acid sequence having at least 90% identity, at least 95% identity, or 100% identity SEQ ID NO:27; VL2 comprises an amino acid sequence having at least 90% identity, at least 95% identity or 100% identity to SEQ ID NO:26; VL3 comprises an amino acid sequence having at least 90% identity, at least 95% identity or 100% identity to SEQ ID NO:29; and VL4 comprises an amino acid sequence having at least 90% identity, at least 95% identity or 100% identity to SEQ ID NO:28. For example, VL1 may comprise an amino acid sequence having at least 90% identity to SEQ ID NO:27; VL2 may comprise an amino acid sequence having at least 90% identity to SEQ ID NO:26; VL3 may comprise an amino acid sequence having at least 90% identity to SEQ ID NO:29; and VL4 may comprise an amino acid sequence having at least 90% identity to SEQ ID NO:28. At least 90% identity may include at least 91%, 92%, 93%, 94%, 95%, 96%, 97%, 98%, 99% or 100% identity to the reference polypeptide sequence. For example, VL1 may comprise the amino acid sequence of SEQ ID NO:27; VL2 may comprise the amino acid sequence of SEQ ID NO:26; VL3 may comprise the amino acid sequence of SEQ ID NO:29; and VL4 may comprise the amino acid sequence of SEQ ID NO:28.

[0239] In some aspects, the invention is directed to an antigen binding polypeptide complex comprising a first polypeptide and a second polypeptide; wherein the first polypeptide has a structure represented by VL1-VL2-VH2-VH1-Fc; VL1-L1-VL2-L2-VH2-L3-VH1-Fc; or VL1-L1-VL2-L2-VH2-L3-VH1-L4-Fc; wherein the second polypeptide has a structure represented by VL3-VL4-VH4-VH3-Fc; VL3-L1-VL4-L2-VH4-L3-VH3-Fc; or VL3-L1-VL4-L2-VH4-L3-VH3-L4-Fc; wherein VL1 is a first immunoglobulin light chain variable region; VL2 is a second immunoglobulin light chain variable region; VL3 is a third immunoglobulin light chain variable region; VL4 is a fourth immunoglobulin light chain variable region; VH1 is a first immunoglobulin heavy chain variable region; VH2 is a second immunoglobulin heavy chain variable region; VH3 is a third immunoglobulin heavy chain variable region; VH4 is a fourth immunoglobulin heavy chain variable region; Fc is a region comprising an immunoglobulin heavy chain constant region 2 (CH2), an immunoglobulin heavy chain constant region 3 (CH3), and optionally, an immunoglobulin hinge; L1, L2, L3 and L4 are amino acid linkers; VH1 comprises an amino acid sequence having at least 90% identity, at least 95% identity, or 100% identity to any one of SEQ ID NOs:20-25; VH2 comprises an amino acid sequence having at least 90% identity, at least 95% identity, or 100% identity to any one of SEQ ID NOs:20-25; VH3 comprises an amino acid sequence having at least 90% identity, at least 95% identity, or 100% identity to any one of SEQ ID NOs:20-25; VH4 comprises an amino acid sequence having at least 90% identity, at least 95% identity, or 100% identity to any one of SEQ ID NOs:20-25; VL1 comprises an amino acid sequence having at least 90% identity, at least 95% identity, or 100% identity to any one of SEQ ID NOs:26-31; VL2 comprises an amino acid sequence having at least 90% identity, at least 95% identity, or 100% identity to any one of SEQ ID NOs:26-31; VL3 comprises an amino acid sequence having at least 90% identity, at least 95% identity, or 100% identity to any one of SEQ ID NOs:26-31; and VL4 comprises an amino acid sequence having at least 90% identity, at least 95% identity, or 100% identity to any one of SEQ ID NOs:26-31. In some aspects, the first polypeptide has a structure represented by VL1-VL2-VH2-VH1-Fc and the second polypeptide has a structure represented by VL3-VL4-VH4-VH3-Fc. In some aspects, the first polypeptide has a structure represented by VL1-VL2-VH2-VH1-Fc and the second polypeptide has a structure represented by VL3-L1-VL4-L2-VH4-L3-VH3-Fc. In some aspects, the first polypeptide has a structure represented by VL1-VL2-VH2-VH1-Fc and the second polypeptide has a structure represented by VL3-L1-VL4-L2-VH4-L3-VH3-L4-Fc. In some aspects, the first polypeptide has a structure represented by VL1-L1-VL2-L2-VH2-L3-VH1-Fc and the second polypeptide has a structure represented by VL3-VL4-VH4-VH3-Fc. In some aspects, the first polypeptide has a structure represented by VL1-L1-VL2-L2-VH2-L3-VH1-Fc and the second polypeptide has a structure represented by VL3-L1-VL4-L2-VH4-L3-VH3-Fc. In some aspects, the first polypeptide has a structure represented by VL1-L1-VL2-L2-VH2-L3-VH1-Fc and the second polypeptide has a structure represented by VL3-L1-VL4-L2-VH4-L3-VH3-L4-Fc. In some aspects, the first polypeptide has a structure represented by VL1-L1-VL2-L2-VH2-L3-VH1-L4-Fc and the second polypeptide has a structure represented by VL3-VL4-VH4-VH3-Fc. In some aspects, the first polypeptide has a structure represented by VL1-L1-VL2-L2-VH2-L3-VH1-L4-Fc and the second polypeptide has a structure represented by VL3-L1-VL4-L2-VH4-L3-VH3-Fc. In some aspects, the first polypeptide has a structure represented by VL1-L1-VL2-L2-VH2-L3-VH1-L4-Fc and the second polypeptide has a structure represented by VL3-L1-VL4-L2-VH4-L3-VH3-L4-Fc. In some aspects, VH1 comprises an amino acid sequence having at least 90% identity to any one of SEQ ID NOs:20-25; VH2 comprises an amino acid sequence having at least 90% identity to any one of SEQ ID NOs:20-25; VH3 comprises an amino acid sequence having at least 90% identity to any one of SEQ ID NOs:20-25; VH4 comprises an amino acid sequence having at least 90% identity to any one of SEQ ID NOs:20-25; VL1 comprises an amino acid sequence having at least 90% identity to any one of SEQ ID NOs:26-31; VL2 comprises an amino acid sequence having at least 90% identity to any one of SEQ ID NOs:26-31; VL3 comprises an amino acid sequence having at least 90% identity to any one of SEQ ID NOs:26-31; and VL4 comprises an amino acid sequence having at least 90% identity to any one of SEQ ID NOs:26-31. At least 90% identity may include at least 91%, 92%, 93%, 94%, 95%, 96%, 97%, 98%, 99% or 100% identity to the reference polypeptide sequence. For example, VH1, VH2, VH3 and/or VH4 may comprise the amino acid sequence of any one of SEQ ID NOs:20-25. For example, VL1, VL2, VL3 and/or VL4 may comprise the amino acid sequence of any one of SEQ ID Nos: 26-31.

[0240] In some aspects, L1 comprises the amino acid sequence of g, ggssg (SEQ ID NO:1), or sggsgssggs (SEQ ID NO:8), L2 comprises the amino acid sequence of ggggsggsgsggggsasgsg (SEQ ID NO:12); L3 comprises the amino acid sequence of g, ggssg (SEQ ID NO:1), or ggsggssgss (SEQ ID NO:7); and L4 comprises the amino acid sequence of asggsg (SEQ ID NO:6).

[0241] In other aspects, the invention is directed to an antigen binding polypeptide complex comprising a first polypeptide and a second polypeptide; wherein the first polypeptide has a structure represented by VL1-VL2-VH2-VH1-CH1-Fc; VL1-L1-VL2-L2-VH2-L3-VH1-CH1-Fc; VL1-L1-VL2-L2-VH2-L3-VH1-L4-CH1-Fc; VL1-VL2-VH2-VH1-CL-Fc; VL1-L1-VL2-L2-VH2-L3-VH1-CL-Fc; or VL1-L1-VL2-L2-VH2-L3-VH1-L4-CL-Fc; wherein the second polypeptide has a structure represented by VL3-VL4-VH4-VH3-CH1-Fc; VL3-L1-VL4-L2-VH4-L3-VH3-CH1-Fc; VL3-L1-VL4-L2-VH4-L3-VH3-L4-CH1-Fc; VL3-VL4-VH4-VH3-CL-Fc; VL3-L1-VL4-L2-VH4-L3-VH3-CL-Fc; or VL3-L1-VL4-L2-VH4-L3-VH3-L4-CL-Fc; wherein VL1 is a first immunoglobulin light chain variable region; VL2 is a second immunoglobulin light chain variable region; VL3 is a third immunoglobulin light chain variable region; VL4 is a fourth immunoglobulin light chain variable region; VH1 is a first immunoglobulin heavy chain variable region; VH2 is a second immunoglobulin heavy chain variable region; VH3 is a third immunoglobulin heavy chain variable region; VH4 is a fourth immunoglobulin heavy chain variable region; Fc is a region comprising an immunoglobulin heavy chain constant region 2 (CH2), an immunoglobulin heavy chain constant region 3 (CH3), and optionally, an immunoglobulin hinge; CH1 is an immunoglobulin heavy chain constant region 1; CL is an immunoglobulin light chain constant region; L1, L2, L3 and L4 are amino acid linkers; VH1 comprises an amino acid sequence having at least 90% identity, at least 95% identity, or 100% identity to any one of SEQ ID NOs:20-25; VH2 comprises an amino acid sequence having at least 90% identity, at least 95% identity, or 100% identity to any one of SEQ ID NOs:20-25; VH3 comprises an amino acid sequence having at least 90% identity, at least 95% identity, or 100% identity to any one of SEQ ID NOs:20-25; VH4 comprises an amino acid sequence having at least 90% identity, at least 95% identity, or 100% identity to any one of SEQ ID NOs:20-25; VL1 comprises an amino acid sequence having at least 90% identity, at least 95% identity, or 100% identity to any one of SEQ ID NOs:26-31; VL2 comprises an amino acid sequence having at least 90% identity, at least 95% identity, or 100% identity to any one of SEQ ID NOs:26-31; VL3 comprises an amino acid sequence having at least 90% identity, at least 95% identity, or 100% identity to any one of SEQ ID NOs:26-31; and VL4 comprises an amino acid sequence having at least 90% identity, at least 95% identity, or 100% identity to any one of SEQ ID NOs:26-31. In some aspects, the first polypeptide has a structure represented by VL1-VL2-VH2-VH1-CH1-Fc and the second polypeptide has a structure represented by VL3-VL4-VH4-VH3-CH1-Fc. In some aspects, the first polypeptide has a structure represented by VL1-VL2-VH2-VH1-CH1-Fc and the second polypeptide has a structure represented by VL3-L1-VL4-L2-VH4-L3-VH3-CH1-Fc. In some aspects, the first polypeptide has a structure represented by VL1-VL2-VH2-VH1-CH1-Fc and the second polypeptide has a structure represented by VL3-L1-VL4-L2-VH4-L3-VH3-L4-CH1-Fc. In some aspects, the first polypeptide has a structure represented by VL1-VL2-VH2-VH1-CH1-Fc and the second polypeptide has a structure represented by VL3-VL4-VH4-VH3-CL-Fc. In some aspects, the first polypeptide has a structure represented by VL1-VL2-VH2-VH1-CH1-Fc and the second polypeptide has a structure represented by VL3-L1-VL4-L2-VH4-L3-VH3-CL-Fc. In some aspects, the first polypeptide has a structure represented by VL1-VL2-VH2-VH1-CH1-Fc and the second polypeptide has a structure represented by VL3-L1-VL4-L2-VH4-L3-VH3-L4-CL-Fc. In some aspects, the first polypeptide has a structure represented by VL1-L1-VL2-L2-VH2-L3-VH1-CH1-Fc and the second polypeptide has a structure represented by VL3-VL4-VH4-VH3-CH1-Fc. In some aspects, the first polypeptide has a structure represented by VL1-L1-VL2-L2-VH2-L3-VH1-CH1-Fc and the second polypeptide has a structure represented by VL3-L1-VL4-L2-VH4-L3-VH3-CH1-Fc. In some aspects, the first polypeptide has a structure represented by VL1-L1-VL2-L2-VH2-L3-VH1-CH1-Fc and the second polypeptide has a structure represented by VL3-L1-VL4-L2-VH4-L3-VH3-L4-CH1-Fc. In some aspects, the first polypeptide has a structure represented by VL1-L1-VL2-L2-VH2-L3-VH1-CH1-Fc and the second polypeptide has a structure represented by VL3-VL4-VH4-VH3-CL-Fc. In some aspects, the first polypeptide has a structure represented by VL1-L1-VL2-L2-VH2-L3-VH1-CH1-Fc and the second polypeptide has a structure represented by VL3-L1-VL4-L2-VH4-L3-VH3-CL-Fc. In some aspects, the first polypeptide has a structure represented by VL1-L1-VL2-L2-VH2-L3-VH1-CH1-Fc and the second polypeptide has a structure represented by VL3-L1-VL4-L2-VH4-L3-VH3-L4-CL-Fc. In some aspects, the first polypeptide has a structure represented by VL1-L1-VL2-L2-VH2-L3-VH1-L4-CH1-Fc and the second polypeptide has a structure represented by VL3-VL4-VH4-VH3-CH1-Fc. In some aspects, the first polypeptide has a structure represented by VL1-L1-VL2-L2-VH2-L3-VH1-L4-CH1-Fc and the second polypeptide has a structure represented by VL3-L1-VL4-L2-VH4-L3-VH3-CH1-Fc. In some aspects, the first polypeptide has a structure represented by VL1-L1-VL2-L2-VH2-L3-VH1-L4-CH1-Fc and the second polypeptide has a structure represented by VL3-L1-VL4-L2-VH4-L3-VH3-L4-CH1-Fc. In some aspects, the first polypeptide has a structure represented by VL1-L1-VL2-L2-VH2-L3-VH1-L4-CH1-Fc and the second polypeptide has a structure represented by VL3-VL4-VH4-VH3-CL-Fc. In some aspects, the first polypeptide has a structure represented by VL1-L1-VL2-L2-VH2-L3-VH1-L4-CH1-Fc and the second polypeptide has a structure represented by VL3-L1-VL4-L2-VH4-L3-VH3-CL-Fc. In some aspects, the first polypeptide has a structure represented by VL1-L1-VL2-L2-VH2-L3-VH1-L4-CH1-Fc and the second polypeptide has a structure represented by VL3-L1-VL4-L2-VH4-L3-VH3-L4-CL-Fc. In some aspects, the first polypeptide has a structure represented by VL1-VL2-VH2-VH1-CL-Fc and the second polypeptide has a structure represented by VL3-VL4-VH4-VH3-CH1-Fc. In some aspects, the first polypeptide has a structure represented by VL1-VL2-VH2-VH1-CL-Fc and the second polypeptide has a structure represented by VL3-L1-VL4-L2-VH4-L3-VH3-CH1-Fc. In some aspects, the first polypeptide has a structure represented by VL1-VL2-VH2-VH1-CL-Fc and the second polypeptide has a structure represented by VL3-L1-VL4-L2-VH4-L3-VH3-L4-CH1-Fc. In some aspects, the first polypeptide has a structure represented by VL1-VL2-VH2-VH1-CL-Fc and the second polypeptide has a structure represented by VL3-VL4-VH4-VH3-CL-Fc. In some aspects, the first polypeptide has a structure represented by VL1-VL2-VH2-VH1-CL-Fc and the second polypeptide has a structure represented by VL3-L1-VL4-L2-VH4-L3-VH3-CL-Fc. In some aspects, the first polypeptide has a structure represented by VL1-VL2-VH2-VH1-CL-Fc and the second polypeptide has a structure represented by VL3-L1-VL4-L2-VH4-L3-VH3-L4-CL-Fc. In some aspects, the first polypeptide has a structure represented by VL1-L1-VL2-L2-VH2-L3-VH1-CL-Fc and the second polypeptide has a structure represented by VL3-VL4-VH4-VH3-CH1-Fc. In some aspects, the first polypeptide has a structure represented by VL1-L1-VL2-L2-VH2-L3-VH1-CL-Fc and the second polypeptide has a structure represented by VL3-L1-VL4-L2-VH4-L3-VH3-CH1-Fc. In some aspects, the first polypeptide has a structure represented by VL1-L1-VL2-L2-VH2-L3-VH1-CL-Fc and the second polypeptide has a structure represented by VL3-L1-VL4-L2-VH4-L3-VH3-L4-CH1-Fc. In some aspects, the first polypeptide has a structure represented by VL1-L1-VL2-L2-VH2-L3-VH1-CL-Fc and the second polypeptide has a structure represented by VL3-VL4-VH4-VH3-CL-Fc. In some aspects, the first polypeptide has a structure represented by VL1-L1-VL2-L2-VH2-L3-VH1-CL-Fc and the second polypeptide has a structure represented by VL3-L1-VL4-L2-VH4-L3-VH3-CL-Fc. In some aspects, the first polypeptide has a structure represented by VL1-L1-VL2-L2-VH2-L3-VH1-CL-Fc and the second polypeptide has a structure represented by VL3-L1-VL4-L2-VH4-L3-VH3-L4-CL-Fc. In some aspects, the first polypeptide has a structure represented by VL1-L1-VL2-L2-VH2-L3-VH1-L4-CL-Fc and the second polypeptide has a structure represented by VL3-VL4-VH4-VH3-CH1-Fc. In some aspects, the first polypeptide has a structure represented by VL1-L1-VL2-L2-VH2-L3-VH1-L4-CL-Fc and the second polypeptide has a structure represented by VL3-L1-VL4-L2-VH4-L3-VH3-CH1-Fc. In some aspects, the first polypeptide has a structure represented by VL1-L1-VL2-L2-VH2-L3-VH1-L4-CL-Fc and the second polypeptide has a structure represented by VL3-L1-VL4-L2-VH4-L3-VH3-L4-CH1-Fc. In some aspects, the first polypeptide has a structure represented by VL1-L1-VL2-L2-VH2-L3-VH1-L4-CL-Fc and the second polypeptide has a structure represented by VL3-VL4-VH4-VH3-CL-Fc. In some aspects, the first polypeptide has a structure represented by VL1-L1-VL2-L2-VH2-L3-VH1-L4-CL-Fc and the second polypeptide has a structure represented by VL3-L1-VL4-L2-VH4-L3-VH3-CL-Fc. In some aspects, the first polypeptide has a structure represented by VL1-L1-VL2-L2-VH2-L3-VH1-L4-CL-Fc and the second polypeptide has a structure represented by VL3-L1-VL4-L2-VH4-L3-VH3-L4-CL-Fc. In some aspects, VH1 comprises an amino acid sequence having at least 90% identity to any one of SEQ ID NOs:20-25; VH2 comprises an amino acid sequence having at least 90% identity to any one of SEQ ID NOs:20-25; VH3 comprises an amino acid sequence having at least 90% identity to any one of SEQ ID NOs:20-25; VH4 comprises an amino acid sequence having at least 90% identity to any one of SEQ ID NOs:20-25; VL1 comprises an amino acid sequence having at least 90% identity to any one of SEQ ID NOs:26-31; VL2 comprises an amino acid sequence having at least 90% identity to any one of SEQ ID NOs:26-31; VL3 comprises an amino acid sequence having at least 90% identity to any one of SEQ ID NOs:26-31; and VL4 comprises an amino acid sequence having at least 90% identity to any one of SEQ ID NOs:26-31. At least 90% identity may include at least 91%, 92%, 93%, 94%, 95%, 96%, 97%, 98%, 99% or 100% identity to the reference polypeptide sequence. For example, VH1, VH2, VH3 and/or VH4 may comprise the amino acid sequence of any one of SEQ ID NOs:20-25. For example, VL1, VL2, VL3 and/or VL4 may comprise the amino acid sequence of any one of SEQ ID Nos: 26-31.

[0242] In some aspects, L1 comprises the amino acid sequence of ggssg (SEQ ID NO:1), L2 comprises the amino acid sequence of ggggsggsgsggggsasgsg (SEQ ID NO:12); L3 comprises the amino acid sequence of ggssg (SEQ ID NO:1); and L4 comprises the amino acid sequence of a, gss, asg or asggs (SEQ ID NO:4).

[0243] In other aspects, the invention is directed to an antigen binding polypeptide complex comprising a first polypeptide and a second polypeptide; wherein the first polypeptide has a structure represented by VL1-VL2-VH2-VH1-CH1-CL-Fc; VL1-L1-VL2-L2-VH2-L3-VH1-CH1-CL-Fc; VL1-VL2-VH2-VH1-CL-CH1-Fc; or VL1-L1-VL2-L2-VH2-L3-VH1-CL-CH1-Fc; wherein the second polypeptide has a structure represented by VL3-VL4-VH4-VH3-Fc; VL3-L1-VL4-L2-VH4-L3-VH3-Fc; or VL3-L1-VL4-L2-VH4-L3-VH3-L4-Fc; wherein VL1 is a first immuno globulin light chain variable region; VL2 is a second immunoglobulin light chain variable region; VL3 is a third immunoglobulin light chain variable region; VL4 is a fourth immunoglobulin light chain variable region; VH1 is a first immunoglobulin heavy chain variable region; VH2 is a second immunoglobulin heavy chain variable region; VH3 is a third immunoglobulin heavy chain variable region; VH4 is a fourth immunoglobulin heavy chain variable region; Fc is a region comprising an immunoglobulin heavy chain constant region 2 (CH2), an immunoglobulin heavy chain constant region 3 (CH3), and optionally, an immunoglobulin hinge; CH1 is an immunoglobulin heavy chain constant region 1; CL is an immunoglobulin light chain constant region; L1, L2 and L3 are amino acid linkers; VH1 comprises an amino acid sequence having at least 90% identity, at least 95% identity, or 100% identity to any one of SEQ ID NOs:20-25; VH2 comprises an amino acid sequence having at least 90% identity, at least 95% identity, or 100% identity to any one of SEQ ID NOs:20-25; VH3 comprises an amino acid sequence having at least 90% identity, at least 95% identity, or 100% identity to any one of SEQ ID NOs:20-25; VH4 comprises an amino acid sequence having at least 90% identity, at least 95% identity, or 100% identity to any one of SEQ ID NOs:20-25; VL1 comprises an amino acid sequence having at least 90% identity, at least 95% identity, or 100% identity to any one of SEQ ID NOs:26-31; VL2 comprises an amino acid sequence having at least 90% identity, at least 95% identity, or 100% identity to any one of SEQ ID NOs:26-31; VL3 comprises an amino acid sequence having at least 90% identity, at least 95% identity, or 100% identity to any one of SEQ ID NOs:26-31; and VL4 comprises an amino acid sequence having at least 90% identity, at least 95% identity, or 100% identity to any one of SEQ ID NOs:26-31. In some aspects, the first polypeptide has a structure represented by VL1-VL2-VH2-VH1-CH1-CL-Fc and the second polypeptide has a structure represented by VL3-VL4-VH4-VH3-Fc. In some aspects, the first polypeptide has a structure represented by VL1-VL2-VH2-VH1-CH1-CL-Fc and the second polypeptide has a structure represented by VL3-L1-VL4-L2-VH4-L3-VH3-Fc. In some aspects, the first polypeptide has a structure represented by VL1-VL2-VH2-VH1-CH1-CL-Fc and the second polypeptide has a structure represented by VL3-L1-VL4-L2-VH4-L3-VH3-L4-Fc. In some aspects, the first polypeptide has a structure represented by VL1-L1-VL2-L2-VH2-L3-VH1-CH1-CL-Fc and the second polypeptide has a structure represented by VL3-VL4-VH4-VH3-Fc. In some aspects, the first polypeptide has a structure represented by VL1-L1-VL2-L2-VH2-L3-VH1-CH1-CL-Fc and the second polypeptide has a structure represented by VL3-L1-VL4-L2-VH4-L3-VH3-Fc. In some aspects, the first polypeptide has a structure represented by VL1-L1-VL2-L2-VH2-L3-VH1-CH1-CL-Fc and the second polypeptide has a structure represented by VL3-L1-VL4-L2-VH4-L3-VH3-L4-Fc. In some aspects, the first polypeptide has a structure represented by VL1-VL2-VH2-VH1-CL-CH1-Fc and the second polypeptide has a structure represented by VL3-VL4-VH4-VH3-Fc. In some aspects, the first polypeptide has a structure represented by VL1-VL2-VH2-VH1-CL-CH1-Fc and the second polypeptide has a structure represented by VL3-L1-VL4-L2-VH4-L3-VH3-Fc. In some aspects, the first polypeptide has a structure represented by VL1-VL2-VH2-VH1-CL-CH1-Fc and the second polypeptide has a structure represented by VL3-L1-VL4-L2-VH4-L3-VH3-L4-Fc. In some aspects, the first polypeptide has a structure represented by VL1-L1-VL2-L2-VH2-L3-VH1-CL-CH1-Fc and the second polypeptide has a structure represented by VL3-VL4-VH4-VH3-Fc. In some aspects, the first polypeptide has a structure represented by VL1-L1-VL2-L2-VH2-L3-VH1-CL-CH1-Fc and the second polypeptide has a structure represented by VL3-L1-VL4-L2-VH4-L3-VH3-Fc. In some aspects, the first polypeptide has a structure represented by VL1-L1-VL2-L2-VH2-L3-VH1-CL-CH1-Fc and the second polypeptide has a structure represented by VL3-L1-VL4-L2-VH4-L3-VH3-L4-Fc. In some aspects, VH1 comprises an amino acid sequence having at least 90% identity to any one of SEQ ID NOs:20-25; VH2 comprises an amino acid sequence having at least 90% identity to any one of SEQ ID NOs:20-25; VH3 comprises an amino acid sequence having at least 90% identity to any one of SEQ ID NOs:20-25; VH4 comprises an amino acid sequence having at least 90% identity to any one of SEQ ID NOs:20-25; VL1 comprises an amino acid sequence having at least 90% identity to any one of SEQ ID NOs:26-31; VL2 comprises an amino acid sequence having at least 90% identity to any one of SEQ ID NOs:26-31; VL3 comprises an amino acid sequence having at least 90% identity to any one of SEQ ID NOs:26-31; and VL4 comprises an amino acid sequence having at least 90% identity to any one of SEQ ID NOs:26-31. At least 90% identity may include at least 91%, 92%, 93%, 94%, 95%, 96%, 97%, 98%, 99% or 100% identity to the reference polypeptide sequence. For example, VH1, VH2, VH3 and/or VH4 may comprise the amino acid sequence of any one of SEQ ID NOs:20-25. For example, VL1, VL2, VL3 and/or VL4 may comprise the amino acid sequence of any one of SEQ ID Nos: 26-31.

[0244] In other aspects, the invention is directed to an antigen binding polypeptide complex comprising a first polypeptide and a second polypeptide; wherein the first polypeptide has a structure represented by VH1-VH2-VL2-VL1-Fc; or VH1-L1-VH2-L2-VL2-L3-VL1-L4-Fc; wherein the second polypeptide has a structure represented by VH3-VH4-VL4-VL3-Fc; or VH3-L1-VH4-L2-VL4-L3-VL3-L4-Fc; wherein VL1 is a first immunoglobulin light chain variable region; VL2 is a second immunoglobulin light chain variable region; VL3 is a third immunoglobulin light chain variable region; VL4 is a fourth immunoglobulin light chain variable region; VH1 is a first immunoglobulin heavy chain variable region; VH2 is a second immunoglobulin heavy chain variable region; VH3 is a third immunoglobulin heavy chain variable region; VH4 is a fourth immunoglobulin heavy chain variable region; Fc is a region comprising an immunoglobulin heavy chain constant region 2 (CH2), an immunoglobulin heavy chain constant region 3 (CH3), and optionally, an immunoglobulin hinge; L1, L2, L3 and L4 are amino acid linkers; VH1 comprises an amino acid sequence having at least 90% identity, at least 95% identity, or 100% identity to any one of SEQ ID NOs:20-25; VH2 comprises an amino acid sequence having at least 90% identity, at least 95% identity, or 100% identity to any one of SEQ ID NOs:20-25; VH3 comprises an amino acid sequence having at least 90% identity, at least 95% identity, or 100% identity to any one of SEQ ID NOs:20-25; VH4 comprises an amino acid sequence having at least 90% identity, at least 95% identity, or 100% identity to any one of SEQ ID NOs:20-25; VL1 comprises an amino acid sequence having at least 90% identity, at least 95% identity, or 100% identity to any one of SEQ ID NOs:26-31; VL2 comprises an amino acid sequence having at least 90% identity, at least 95% identity, or 100% identity to any one of SEQ ID NOs:26-31; VL3 comprises an amino acid sequence having at least 90% identity, at least 95% identity, or 100% identity to any one of SEQ ID NOs:26-31; and VL4 comprises an amino acid sequence having at least 90% identity, at least 95% identity, or 100% identity to any one of SEQ ID NOs:26-31. In some aspects, the first polypeptide has a structure represented by VH1-VH2-VL2-VL1-Fc and the second polypeptide has a structure represented by VH3-VH4-VL4-VL3-Fc. In some aspects, the first polypeptide has a structure represented by VH1-VH2-VL2-VL1-Fc and the second polypeptide has a structure represented by VH3-L1-VH4-L2-VL4-L3-VL3-L4-Fc. In some aspects, the first polypeptide has a structure represented by VH1-L1-VH2-L2-VL2-L3-VL1-L4-Fc and the second polypeptide has a structure represented by VH3-VH4-VL4-VL3-Fc. In some aspects, the first polypeptide has a structure represented by VH1-L1-VH2-L2-VL2-L3-VL1-L4-Fc and the second polypeptide has a structure represented by VH3-L1-VH4-L2-VL4-L3-VL3-L4-Fc. In some aspects, VH1 comprises an amino acid sequence having at least 90% identity to any one of SEQ ID NOs:20-25; VH2 comprises an amino acid sequence having at least 90% identity to any one of SEQ ID NOs:20-25; VH3 comprises an amino acid sequence having at least 90% identity to any one of SEQ ID NOs:20-25; VH4 comprises an amino acid sequence having at least 90% identity to any one of SEQ ID NOs:20-25; VL1 comprises an amino acid sequence having at least 90% identity to any one of SEQ ID NOs:26-31; VL2 comprises an amino acid sequence having at least 90% identity to any one of SEQ ID NOs:26-31; VL3 comprises an amino acid sequence having at least 90% identity to any one of SEQ ID NOs:26-31; and VL4 comprises an amino acid sequence having at least 90% identity to any one of SEQ ID NOs:26-31. At least 90% identity may include at least 91%, 92%, 93%, 94%, 95%, 96%, 97%, 98%, 99% or 100% identity to the reference polypeptide sequence. For example, VH1, VH2, VH3 and/or VH4 may comprise the amino acid sequence of any one of SEQ ID NOs:20-25. For example, VL1, VL2, VL3 and/or VL4 may comprise the amino acid sequence of any one of SEQ ID Nos: 26-31.

[0245] In some aspects, L1 comprises the amino acid sequence of ggssg (SEQ ID NO:1), L2 comprises the amino acid sequence of ggggsggsgsggggsasgsg (SEQ ID NO:12); L3 comprises the amino acid sequence of ggssg (SEQ ID NO:1); and L4 comprises the amino acid sequence of asggsg (SEQ ID NO:6).

[0246] In some aspects, one or more of VH1, VH2, VH3 and VH4 comprises a CDR1 comprising the amino acid sequence of SEQ ID NO:98 or an amino acid sequence having at least 90% identity or at least 95% identity to SEQ ID NO:98; a CDR2 comprising the amino acid sequence of SEQ ID NO:99 or an amino acid sequence having at least 90% identity or at least 95% identity to SEQ ID NO:99; and a CDR3 comprising the amino acid sequence of SEQ ID NO:100 or an amino acid sequence having at least 90% identity or at least 95% identity to SEQ ID NO:100; and one or more of VL1, VL2, VL3 and VL4 comprises a CDR1 comprising the amino acid sequence of SEQ ID NO:101 or an amino acid sequence having at least 90% identity or at least 95% identity to SEQ ID NO:101, a CDR2 comprising an amino acid sequence of SEQ ID NO:102 or an amino acid sequence having at least 90% identity or 95% identity to SEQ ID NO:102, and a CDR3 comprising the amino acid sequence of SEQ ID NO:103 or an amino acid sequence having at least 90% identity or at least 95% identity to SEQ ID NO:103. In some aspects, one or more of VH1, VH2, VH3 and VH4 comprises a CDR1 comprising an amino acid sequence having at least 90% identity to SEQ ID NO:98; a CDR2 comprising an amino acid sequence having at least 90% identity to SEQ ID NO:99; and a CDR3 comprising an amino acid sequence having at least 90% identity to SEQ ID NO:100; and one or more of VL1, VL2, VL3 and VL4 comprises a CDR1 comprising an amino acid sequence having at least 90% identity to SEQ ID NO:101, a CDR2 comprising an amino acid sequence having at least 90% identity to SEQ ID NO:102, and a CDR3 comprising an amino acid sequence having at least 90% identity to SEQ ID NO:103. At least 90% identity may include at least 91%, 92%, 93%, 94%, 95%, 96%, 97%, 98%, 99% or 100% identity to the reference polypeptide sequence. For example, one or more of VH1, VH2, VH3 and VH4 may comprise a CDR1 comprising the amino acid sequence of SEQ ID NO:98; a CDR2 comprising the amino acid sequence of SEQ ID NO:99; and a CDR3 comprising the amino acid sequence of SEQ ID NO:100; and one or more of VL1, VL2, VL3 and VL4 comprises a CDR1 comprising the amino acid sequence of SEQ ID NO:101, a CDR2 comprising the amino acid sequence of SEQ ID NO:102, and a CDR3 comprising the amino acid sequence of SEQ ID NO:103.

[0247] In some aspects, one or more of VH1, VH2, VH3 and VH4 comprises a CDR1 comprising the amino acid sequence of SEQ ID NO:104 or an amino acid sequence having at least 90% identity or at least 95% identity to SEQ ID NO:104; a CDR2 comprising the amino acid sequence of SEQ ID NO:105 or an amino acid sequence having at least 90% identity or at least 95% identity to SEQ ID NO:105; and a CDR3 comprising the amino acid sequence of SEQ ID NO:106 or an amino acid sequence having at least 90% identity or at least 95% identity to SEQ ID NO:106; and one or more of VL1, VL2, VL3 and VL4 comprises a CDR1 comprising the amino acid sequence of SEQ ID NO:107 or an amino acid sequence having at least 90% identity or at least 95% identity to SEQ ID NO:107, a CDR2 comprising an amino acid sequence of SEQ ID NO:108 or an amino acid sequence having at least 90% identity or 95% identity to SEQ ID NO:108, and a CDR3 comprising the amino acid sequence of SEQ ID NO:109 or an amino acid sequence having at least 90% identity or at least 95% identity to SEQ ID NO:109. In some aspects, one or more of VH1, VH2, VH3 and VH4 comprises a CDR1 comprising an amino acid sequence having at least 90% identity to SEQ ID NO:104; a CDR2 comprising an amino acid sequence having at least 90% identity to SEQ ID NO:105; and a CDR3 comprising an amino acid sequence having at least 90% identity to SEQ ID NO:106; and one or more of VL1, VL2, VL3 and VL4 comprises a CDR1 comprising an amino acid sequence having at least 90% identity to SEQ ID NO:107, a CDR2 comprising an amino acid sequence having at least 90% identity to SEQ ID NO:108, and a CDR3 comprising an amino acid sequence having at least 90% identity to SEQ ID NO:109. At least 90% identity may include at least 91%, 92%, 93%, 94%, 95%, 96%, 97%, 98%, 99% or 100% identity to the reference polypeptide sequence. For example, one or more of VH1, VH2, VH3 and VH4 may comprise a CDR1 comprising the amino acid sequence of SEQ ID NO:104; a CDR2 comprising the amino acid sequence of SEQ ID NO:105; and a CDR3 comprising the amino acid sequence of SEQ ID NO:106; and one or more of VL1, VL2, VL3 and VL4 comprises a CDR1 comprising the amino acid sequence of SEQ ID NO:107, a CDR2 comprising the amino acid sequence of SEQ ID NO:108, and a CDR3 comprising the amino acid sequence of SEQ ID NO:109.

[0248] In some aspects, one or more of VH1, VH2, VH3 and VH4 comprises a CDR1 comprising the amino acid sequence of SEQ ID NO:56 or an amino acid sequence having at least 90% identity or at least 95% identity to SEQ ID NO:56; a CDR2 comprising the amino acid sequence of SEQ ID NO:57 or an amino acid sequence having at least 90% identity or at least 95% identity to SEQ ID NO:57; and a CDR3 comprising the amino acid sequence of SEQ ID NO:58 or an amino acid sequence having at least 90% identity or at least 95% identity to SEQ ID NO:58; and one or more of VL1, VL2, VL3 and VL4 comprises a CDR1 comprising the amino acid sequence of SEQ ID NO:59 or an amino acid sequence having at least 90% identity or at least 95% identity to SEQ ID NO:59, a CDR2 comprising an amino acid sequence of SEQ ID NO:60 or an amino acid sequence having at least 90% identity or 95% identity to SEQ ID NO:60, and a CDR3 comprising the amino acid sequence of SEQ ID NO:61 or an amino acid sequence having at least 90% identity or at least 95% identity to SEQ ID NO:61. In some aspects, one or more of VH1, VH2, VH3 and VH4 comprises a CDR1 comprising an amino acid sequence having at least 90% identity to SEQ ID NO:56; a CDR2 comprising an amino acid sequence having at least 90% identity to SEQ ID NO:57; and a CDR3 comprising an amino acid sequence having at least 90% identity to SEQ ID NO:58; and one or more of VL1, VL2, VL3 and VL4 comprises a CDR1 comprising an amino acid sequence having at least 90% identity to SEQ ID NO:59, a CDR2 comprising an amino acid sequence having at least 90% identity to SEQ ID NO:60, and a CDR3 comprising an amino acid sequence having at least 90% identity to SEQ ID NO:61. At least 90% identity may include at least 91%, 92%, 93%, 94%, 95%, 96%, 97%, 98%, 99% or 100% identity to the reference polypeptide sequence. For example, one or more of VH1, VH2, VH3 and VH4 may comprise a CDR1 comprising the amino acid sequence of SEQ ID NO:56; a CDR2 comprising the amino acid sequence of SEQ ID NO:57; and a CDR3 comprising the amino acid sequence of SEQ ID NO:58; and one or more of VL1, VL2, VL3 and VL4 comprises a CDR1 comprising the amino acid sequence of SEQ ID NO:59, a CDR2 comprising the amino acid sequence of SEQ ID NO:60, and a CDR3 comprising the amino acid sequence of SEQ ID NO:61.

[0249] In some aspects, one or more of VH1, VH2, VH3 and VH4 comprises a CDR1 comprising the amino acid sequence of SEQ ID NO:110 or an amino acid sequence having at least 90% identity or at least 95% identity to SEQ ID NO:110; a CDR2 comprising the amino acid sequence of SEQ ID NO:111 or an amino acid sequence having at least 90% identity or at least 95% identity to SEQ ID NO:111; and a CDR3 comprising the amino acid sequence of SEQ ID NO:112 or an amino acid sequence having at least 90% identity or at least 95% identity to SEQ ID NO:112; and one or more of VL1, VL2, VL3 and VL4 comprises a CDR1 comprising the amino acid sequence of SEQ ID NO:113 or an amino acid sequence having at least 90% identity or at least 95% identity to SEQ ID NO:113, a CDR2 comprising an amino acid sequence of SEQ ID NO:114 or an amino acid sequence having at least 90% identity or 95% identity to SEQ ID NO:114, and a CDR3 comprising the amino acid sequence of SEQ ID NO:115 or an amino acid sequence having at least 90% identity or at least 95% identity to SEQ ID NO:115. In some aspects, one or more of VH1, VH2, VH3 and VH4 comprises a CDR1 comprising an amino acid sequence having at least 90% identity to SEQ ID NO:110; a CDR2 comprising an amino acid sequence having at least 90% identity to SEQ ID NO:111; and a CDR3 comprising an amino acid sequence having at least 90% identity to SEQ ID NO:112; and one or more of VL1, VL2, VL3 and VL4 comprises a CDR1 comprising an amino acid sequence having at least 90% identity to SEQ ID NO:113, a CDR2 comprising an amino acid sequence having at least 90% identity to SEQ ID NO:114, and a CDR3 comprising an amino acid sequence having at least 90% identity to SEQ ID NO:115. At least 90% identity may include at least 91%, 92%, 93%, 94%, 95%, 96%, 97%, 98%, 99% or 100% identity to the reference polypeptide sequence. For example, one or more of VH1, VH2, VH3 and VH4 may comprise a CDR1 comprising the amino acid sequence of SEQ ID NO:110; a CDR2 comprising the amino acid sequence of SEQ ID NO:111; and a CDR3 comprising the amino acid sequence of SEQ ID NO:112; and one or more of VL1, VL2, VL3 and VL4 comprises a CDR1 comprising the amino acid sequence of SEQ ID NO:113, a CDR2 comprising the amino acid sequence of SEQ ID NO:114, and a CDR3 comprising the amino acid sequence of SEQ ID NO:115.

[0250] In some aspects, one or more of VH1, VH2, VH3 and VH4 comprises a CDR1 comprising the amino acid sequence of SEQ ID NO:116 or an amino acid sequence having at least 90% identity or at least 95% identity to SEQ ID NO:116; a CDR2 comprising the amino acid sequence of SEQ ID NO:117 or an amino acid sequence having at least 90% identity or at least 95% identity to SEQ ID NO:117; and a CDR3 comprising the amino acid sequence of SEQ ID NO:118 or an amino acid sequence having at least 90% identity or at least 95% identity to SEQ ID NO:118; and one or more of VL1, VL2, VL3 and VL4 comprises a CDR1 comprising the amino acid sequence of SEQ ID NO:119 or an amino acid sequence having at least 90% identity or at least 95% identity to SEQ ID NO:119, a CDR2 comprising an amino acid sequence of SEQ ID NO:120 or an amino acid sequence having at least 90% identity or 95% identity to SEQ ID NO:120, and a CDR3 comprising the amino acid sequence of SEQ ID NO:121 or an amino acid sequence having at least 90% identity or at least 95% identity to SEQ ID NO:121. In some aspects, one or more of VH1, VH2, VH3 and VH4 comprises a CDR1 comprising an amino acid sequence having at least 90% identity to SEQ ID NO:116; a CDR2 comprising an amino acid sequence having at least 90% identity to SEQ ID NO:117; and a CDR3 comprising an amino acid sequence having at least 90% identity to SEQ ID NO:118; and one or more of VL1, VL2, VL3 and VL4 comprises a CDR1 comprising an amino acid sequence having at least 90% identity to SEQ ID NO:119, a CDR2 comprising an amino acid sequence having at least 90% identity to SEQ ID NO:120, and a CDR3 comprising an amino acid sequence having at least 90% identity to SEQ ID NO:21 At least 90% identity may include at least 91%, 92%, 93%, 94%, 95%, 96%, 97%, 98%, 99% or 100% identity to the reference polypeptide sequence. For example, one or more of VH1, VH2, VH3 and VH4 may comprise a CDR1 comprising the amino acid sequence of SEQ ID NO:116; a CDR2 comprising the amino acid sequence of SEQ ID NO:117; and a CDR3 comprising the amino acid sequence of SEQ ID NO:118; and one or more of VL1, VL2, VL3 and VL4 comprises a CDR1 comprising the amino acid sequence of SEQ ID NO:119, a CDR2 comprising the amino acid sequence of SEQ ID NO:120, and a CDR3 comprising the amino acid sequence of SEQ ID NO:121.

[0251] In some aspects, one or more of VH1, VH2, VH3 and VH4 comprises a CDR1 comprising the amino acid sequence of SEQ ID NO:124 or an amino acid sequence having at least 90% identity or at least 95% identity to SEQ ID NO:124; a CDR2 comprising the amino acid sequence of SEQ ID NO:125 or an amino acid sequence having at least 90% identity or at least 95% identity to SEQ ID NO:125; and a CDR3 comprising the amino acid sequence of SEQ ID NO:126 or an amino acid sequence having at least 90% identity or at least 95% identity to SEQ ID NO:126; and one or more of VL1, VL2, VL3 and VL4 comprises a CDR1 comprising the amino acid sequence of SEQ ID NO:127 or an amino acid sequence having at least 90% identity or at least 95% identity to SEQ ID NO:127, a CDR2 comprising an amino acid sequence of SEQ ID NO:128 or an amino acid sequence having at least 90% identity or 95% identity to SEQ ID NO:128, and a CDR3 comprising the amino acid sequence of SEQ ID NO:129 or an amino acid sequence having at least 90% identity or at least 95% identity to SEQ ID NO:129. In some aspects, one or more of VH1, VH2, VH3 and VH4 comprises a CDR1 comprising an amino acid sequence having at least 90% identity to SEQ ID NO:124; a CDR2 comprising an amino acid sequence having at least 90% identity to SEQ ID NO:125; and a CDR3 comprising an amino acid sequence having at least 90% identity to SEQ ID NO:126; and one or more of VL1, VL2, VL3 and VL4 comprises a CDR1 comprising an amino acid sequence having at least 90% identity to SEQ ID NO:127, a CDR2 comprising an amino acid sequence having at least 90% identity to SEQ ID NO:128, and a CDR3 comprising an amino acid sequence having at least 90% identity to SEQ ID NO:129. At least 90% identity may include at least 91%, 92%, 93%, 94%, 95%, 96%, 97%, 98%, 99% or 100% identity to the reference polypeptide sequence. For example, one or more of VH1, VH2, VH3 and VH4 may comprise a CDR1 comprising the amino acid sequence of SEQ ID NO:124; a CDR2 comprising the amino acid sequence of SEQ ID NO:125; and a CDR3 comprising the amino acid sequence of SEQ ID NO:126; and one or more of VL1, VL2, VL3 and VL4 comprises a CDR1 comprising the amino acid sequence of SEQ ID NO:127, a CDR2 comprising the amino acid sequence of SEQ ID NO:128, and a CDR3 comprising the amino acid sequence of SEQ ID NO:129.

[0252] In other aspects, the invention is directed to an antigen binding polypeptide complex comprising one, two, three or four antigen binding polypeptides described herein. In some aspects, the antigen binding polypeptide complex comprises a polypeptide having an amino acid sequence having at least 90% identity, at least 95% identity, or 100% identity to one or more of SEQ ID NOs:32-43, 62-79, 130-138, 633, 635, 637, 639, 641, 643, 645, 647, 649, 651, 653, 655, 657, 659, 661, 663, 665, 667, 669, 671, 673, 675, 677, and 679. In some aspects, the antigen binding polypeptide complex comprises a polypeptide having an amino acid sequence having at least 90% identity (such as at least 91%, 92%, 93%, 94%, 95%, 96%, 97%, 98%, or 99%) to one or more of SEQ ID NOs:32-43, 62-79, 130-138, 633, 635, 637, 639, 641, 643, 645, 647, 649, 651, 653, 655, 657, 659, 661, 663, 665, 667, 669, 671, 673, 675, 677, and 679. For example, the antigen binding polypeptide complex may comprise a polypeptide having the amino acid sequence of any one or more of SEQ ID NOs:32-43, 62-79 130-138, 633, 635, 637, 639, 641, 643, 645, 647, 649, 651, 653, 655, 657, 659, 661, 663, 665, 667, 669, 671, 673, 675, 677, and 679. In some aspects, the invention is directed to an antigen binding polypeptide or antigen binding polypeptide complex (e.g., antibody or antigen binding fragment thereof) comprising an amino acid sequence having at least 90% identity, at least 95% identity, or 100% identity to the amino acid sequence of SEQ ID NOs:32 or 33 that does not contain the eight histidine residues at the C-terminus. In some aspects, the antigen binding polypeptide complex comprises a polypeptide having an amino acid sequence having at least 90% (such as at least 91%, 92%, 93%, 94%, 95%, 96%, 97%, 98%, or 99%) identity to the amino acid sequence of SEQ ID NOs:32 or 33 that does not contain the eight histidine residues at the C-terminus. For example, the antigen binding polypeptide complex may comprise a polypeptide having the amino acid sequence of the amino acid sequence of SEQ ID NOs:32 or 33 that does not contain the eight histidine residues at the C-terminus. In some aspects, the antigen binding polypeptide complex comprises a first polypeptide and a second polypeptide each having an amino acid sequence having at least 90% identity, at least 95% identity, or 100% identity to one or more of SEQ ID NOs:32-43, 62-79, 130-138, 633, 635, 637, 639, 641, 643, 645, 647, 649, 651, 653, 655, 657, 659, 661, 663, 665, 667, 669, 671, 673, 675, 677, and 679. For example, the antigen binding polypeptide complex may comprise a first polypeptide and a second polypeptide each having an amino acid sequence having at least 90% (such as at least 91%, 92%, 93%, 94%, 95% identity, 96%, 97%, 98% or 99%) identity to one or more of SEQ ID NOs:32-43, 62-79, 130-138, 633, 635, 637, 639, 641, 643, 645, 647, 649, 651, 653, 655, 657, 659, 661, 663, 665, 667, 669, 671, 673, 675, 677, and 679. For example, the antigen binding polypeptide complex may comprise a first polypeptide and a second polypeptide each having the amino acid sequence of any one or more of SEQ ID NOs:32-43, 62-79, 130-138, 633, 635, 637, 639, 641, 643, 645, 647, 649, 651, 653, 655, 657, 659, 661, 663, 665, 667, 669, 671, 673, 675, 677, and 679. In some aspects, the antigen binding polypeptide complex comprises a first polypeptide and a second polypeptide each having an amino acid sequence having at least 90% identity, at least 95% identity, or 100% identity to the amino acid sequence of SEQ ID NOs:32 or 33 that does not contain the eight histidine residues at the C-terminus. For example, the antigen binding polypeptide complex may comprise a first polypeptide and a second polypeptide each having an amino acid sequence having at least 90% (such as at least 91%, 92%, 93%, 94%, 95% identity, 96%, 97%, 98% or 99%) identity to SEQ ID NOs: 32 or 33 that does not contain the eight histidine residues at the C-terminus. For example, the antigen binding polypeptide complex may comprise a first polypeptide and a second polypeptide each having the amino acid sequence of SEQ ID NOs: 32 or 33 that does not contain the eight histidine residues at the C-terminus. In some aspects, the antigen binding polypeptide complex comprises a polypeptide having an amino acid sequence encoded by a polynucleotide having at least 90% identity, at least 95% identity, or 100% identity to one or more of SEQ ID NOs:44-55, 80-97, 139-147, 634, 636, 638, 640, 642, 644, 646, 648, 650, 652, 654, 656, 658, 660, 662, 664, 666, 668, 670, 672, 674, 676, 678, and 680. For example, the antigen binding polypeptide complex may comprise a polypeptide having an amino acid sequence encoded by a polynucleotide having at least 90% (such as at least 91%, 92%, 93%, 94%, 95% identity, 96%, 97%, 98% or 99%) identity to one or more of SEQ ID NOs:44-55, 80-97, 139-147, 634, 636, 638, 640, 642, 644, 646, 648, 650, 652, 654, 656, 658, 660, 662, 664, 666, 668, 670, 672, 674, 676, 678, and 680. For example, the antigen binding polypeptide complex may comprise a polypeptide having an amino acid sequence encoded by a polynucleotide having any one of SEQ ID NOs:44-55, 80-97, 139-147, 634, 636, 638, 640, 642, 644, 646, 648, 650, 652, 654, 656, 658, 660, 662, 664, 666, 668, 670, 672, 674, 676, 678, and 680. In some aspects, the antigen binding polypeptide complex comprises a first polypeptide and a second polypeptide each having an amino acid sequence encoded by a polynucleotide having at least 90% identity, at least 95% identity, or 100% identity to one or more of SEQ ID NOs:44-55, 80-97, 139-147, 634, 636, 638, 640, 642, 644, 646, 648, 650, 652, 654, 656, 658, 660, 662, 664, 666, 668, 670, 672, 674, 676, 678, and 680. For example, the antigen binding polypeptide complex may comprise a first polypeptide and a second polypeptide each having an amino acid sequence encoded by a polynucleotide having at least 90% (such as at least 91%, 92%, 93%, 94%, 95% identity, 96%, 97%, 98% or 99%) identity to one or more of SEQ ID NOs:44-55, 80-97, 139-147, 634, 636, 638, 640, 642, 644, 646, 648, 650, 652, 654, 656, 658, 660, 662, 664, 666, 668, 670, 672, 674, 676, 678, and 680. For example, the antigen binding polypeptide complex may comprise a first polypeptide and a second polypeptide each having an amino acid sequence encoded by a polynucleotide as shown in any one of SEQ ID NOs:44-55, 80-97, 139-147, 634, 636, 638, 640, 642, 644, 646, 648, 650, 652, 654, 656, 658, 660, 662, 664, 666, 668, 670, 672, 674, 676, 678, and 680. In some aspects, the antigen binding polypeptide complex comprises a first polypeptide and a second polypeptide, wherein the first polypeptide comprises an amino acid sequence having at least 90% identity, at least 95% identity, or 100% identity to any one of SEQ ID NOs:32-43, 62-79, 130-138, 633, 635, 637, 639, 641, 643, 645, 647, 649, 651, 653, 655, 657, 659, 661, 663, 665, 667, 669, 671, 673, 675, 677, and 679, or an amino acid sequence having at least 90% identity, at least 95% identity, or 100% identity to the amino acid sequence of SEQ ID NOs:32 or 33 that does not contain the eight histidine residues at the C-terminus, wherein the second polypeptide has a structure represented by: Fc, and wherein Fc is a region comprising an immunoglobulin heavy chain constant region 2 (CH2), an immunoglobulin heavy chain constant region 3 (CH3), and optionally, an immunoglobulin hinge. For example, the antigen binding polypeptide complex may comprise a first polypeptide and a second polypeptide, wherein the first polypeptide comprises an amino acid sequence having at least 90% (such as at least 91%, 92%, 93%, 94%, 95% identity, 96%, 97%, 98% or 99%) identity to any one of SEQ ID NOs:32-43, 62-79, 130-138, 633, 635, 637, 639, 641, 643, 645, 647, 649, 651, 653, 655, 657, 659, 661, 663, 665, 667, 669, 671, 673, 675, 677, and 679; and the second polypeptide comprises an Fc. For example, the antigen binding polypeptide complex may comprise a first polypeptide and a second polypeptide, wherein the first polypeptide comprises the amino acid sequence of any one of SEQ ID NOs:32-43, 62-79, 130-138, 633, 635, 637, 639, 641, 643, 645, 647, 649, 651, 653, 655, 657, 659, 661, 663, 665, 667, 669, 671, 673, 675, 677, and 679; and the second polypeptide comprises an Fc. For example, the antigen binding polypeptide complex may comprise a first polypeptide and a second polypeptide, wherein the first polypeptide comprises an amino acid sequence having at least 90% (such as at least 91%, 92%, 93%, 94%, 95% identity, 96%, 97%, 98% or 99%) identity to SEQ ID NOs:32 or 33 that does not contain the eight histidine residues at the C-terminus; and the second polypeptide comprises an Fc. For example, the antigen binding polypeptide complex may comprise a first polypeptide and a second polypeptide, wherein the first polypeptide comprises the amino acid sequence of SEQ ID NOs:32 or 33 that does not contain the eight histidine residues at the C-terminus; and the second polypeptide comprises an Fc.

[0253] In some aspects of an antigen binding polypeptide or antigen binding polypeptide complex of the invention, VL1 is a first immunoglobulin light chain variable region that specifically binds to at least one epitope on at least one antigen selected from the group consisting of A2AR, APRIL, ATPDase, BAFF, BAFFR, BCMA, BlyS, BTK, BTLA, B7DC, B7H1, B7H2, B7H3, B7H4, B7H5, B7H6, B7H7, B7RP1, B7-4, C3, C5, CCL2, CCL3, CCL4, CCL5, CCL7, CCL8, CCL11, CCL15, CCL17, CCL19, CCL20, CCL21, CCL25 CCR3, CCR4, CD3, CD16A, CD19, CD20, CD24, CD27, CD28, CD30, CD38, CD39, CD40, CD40L, CD47, CD52, CD70, CD80, CD86, CD123, CD133, CD137, CD137L, CD160, CD272, CEACAM5, CLEC9, CLEC91, CRTH2, CSF-1, CSF-2, CSF-3, CXCL1, CXCL2, CXCL4, CXCL12, CXCL13, CXCR3, cMet, CTLA4, DLL3, DLL4, DNGR-1, E-cadherin, EGFR, ENTPD1, EpCAM, FCER1, FCER1A, FCER2, FGFR, FLAP, FOLH1, Gi24, GITR, GITRL, GPR5, GP100, GPRC5D, HER2, HER3, ICOSL, ICOS, HHLA2, HMGB1, HVEM, IDO, IFNa, IgE, IGF1R, IL2Rbeta, IL1, ILIA, IL1B, IL1F10, IL2, IL4, IL4Ra, IL5, IL5R, IL6, IL7, IL7Ra, IL8, IL9, IL9R, IL10, rhIL1O, IL12, IL13, IL13Ra1, IL13Ra2, IL15, IL17, IL17Rb, IL18, IL22, IL23, IL25, IL7, IL33, IL35, ITGB4, ITK, KIR, LAG3, LAMP1, leptin, LPFS2, MHC class II, MUC-1, MUC-16, NCR3LG1, NKG2D, NKp46, NTPDase-1, OX40, OX40L, PD-1, PD-L1, PD-L2, PROM1, S152, SIRPalpha, SISP1, SLC, SPG64, ST2, STEAP1, STEAP2, Syk kinase, STEAP1, TROP2, TACI, TDO, TGFBETA, T14, TIGIT, TIM3, TLR, TLR2, TLR4, TLR5, TLR9, TMEF1, TNFa, TNFRSF7, Tp55, TREM1, TSLP, TSLPR, TWEAK, VEGF, VISTA, Vstm3, or WUCAM. For example, VL1 may specifically bind to at least one epitope on A2AR. For example, VL1 may specifically bind to at least one epitope on APRIL. For example, VL1 may specifically bind to at least one epitope on ATPDase. For example, VL1 may specifically bind to at least one epitope on BAFF. For example, VL1 may specifically bind to at least one epitope on BAFFR. For example, VL1 may specifically bind to at least one epitope on BCMA. For example, VL1 may specifically bind to at least one epitope on BlyS. For example, VL1 may specifically bind to at least one epitope on BTK. For example, VL1 may specifically bind to at least one epitope on BTLA. For example, VL1 may specifically bind to at least one epitope on B7DC. For example, VL1 may specifically bind to at least one epitope on B7H1. For example, VL1 may specifically bind to at least one epitope on B7H2. For example, VL1 may specifically bind to at least one epitope on B7H3. For example, VL1 may specifically bind to at least one epitope on B7H4. For example, VL1 may specifically bind to at least one epitope on B7H5. For example, VL1 may specifically bind to at least one epitope on B7H6. For example, VL1 may specifically bind to at least one epitope on B7H7. For example, VL1 may specifically bind to at least one epitope on B7RP1. For example, VL1 may specifically bind to at least one epitope on B7-4. For example, VL1 may specifically bind to at least one epitope on C3. For example, VL1 may specifically bind to at least one epitope on C5. For example, VL1 may specifically bind to at least one epitope on CCL2. For example, VL1 may specifically bind to at least one epitope on CCL3. For example, VL1 may specifically bind to at least one epitope on CCL4. For example, VL1 may specifically bind to at least one epitope on CCL5. For example, VL1 may specifically bind to at least one epitope on CCL7. For example, VL1 may specifically bind to at least one epitope on CCL8. For example, VL1 may specifically bind to at least one epitope on CCL11. For example, VL1 may specifically bind to at least one epitope on CCL15. For example, VL1 may specifically bind to at least one epitope on CCL17. For example, VL1 may specifically bind to at least one epitope on CCL19. For example, VL1 may specifically bind to at least one epitope on CCL20. For example, VL1 may specifically bind to at least one epitope on CCL21. For example, VL1 may specifically bind to at least one epitope on CCL25. For example, VL1 may specifically bind to at least one epitope on CCR3. For example, VL1 may specifically bind to at least one epitope on CCR4. For example, VL1 may specifically bind to at least one epitope on CD3. For example, VL1 may specifically bind to at least one epitope on CD19. For example, VL1 may specifically bind to at least one epitope on CD20. For example, VL1 may specifically bind to at least one epitope on CD24. For example, VL1 may specifically bind to at least one epitope on CD27. For example, VL1 may specifically bind to at least one epitope on CD28. For example, VL1 may specifically bind to at least one epitope on CD38. For example, VL1 may specifically bind to at least one epitope on CD39. For example, VL1 may specifically bind to at least one epitope on CD40. For example, VL1 may specifically bind to at least one epitope on CD40L. For example, VL1 may specifically bind to at least one epitope on CD47. For example, VL1 may specifically bind to at least one epitope on CD52. For example, VL1 may specifically bind to at least one epitope on CD70. For example, VL1 may specifically bind to at least one epitope on CD80. For example, VL1 may specifically bind to at least one epitope on CD86. For example, VL1 may specifically bind to at least one epitope on CD123. For example, VL1 may specifically bind to at least one epitope on CD133. For example, VL1 may specifically bind to at least one epitope on CD137. For example, VL1 may specifically bind to at least one epitope on CD137L. For example, VL1 may specifically bind to at least one epitope on CD160. For example, VL1 may specifically bind to at least one epitope on CD272. For example, VL1 may specifically bind to at least one epitope on CEACAM5. For example, VL1 may specifically bind to at least one epitope on CLEC9. For example, VL1 may specifically bind to at least one epitope on CLEC91. For example, VL1 may specifically bind to at least one epitope on CRTH2. For example, VL1 may specifically bind to at least one epitope on CSF-1. For example, VL1 may specifically bind to at least one epitope on CSF-2. For example, VL1 may specifically bind to at least one epitope on CSF-3. For example, VL1 may specifically bind to at least one epitope on CXCL1. For example, VL1 may specifically bind to at least one epitope on CXCL2. For example, VL1 may specifically bind to at least one epitope on CXCL4. For example, VL1 may specifically bind to at least one epitope on CXCL12. For example, VL1 may specifically bind to at least one epitope on CXCL13. For example, VL1 may specifically bind to at least one epitope on CXCR3. For example, VL1 may specifically bind to at least one epitope on cMet. For example, VL1 may specifically bind to at least one epitope on CTLA4. For example, VL1 may specifically bind to at least one epitope on DLL3. For example, VL1 may specifically bind to at least one epitope on DNGR-1. For example, VL1 may specifically bind to at least one epitope on E-cadherin. For example, VL1 may specifically bind to at least one epitope on EGFR. For example, VL1 may specifically bind to at least one epitope on ENTPD1. For example, VL1 may specifically bind to at least one epitope on EpCAM. For example, VL1 may specifically bind to at least one epitope on FCER1. For example, VL1 may specifically bind to at least one epitope on FCER1A. For example, VL1 may specifically bind to at least one epitope on FCER2. For example, VL1 may specifically bind to at least one epitope on FGFR. For example, VL1 may specifically bind to at least one epitope on FLAP. For example, VL1 may specifically bind to at least one epitope on FOLH1. For example, VL1 may specifically bind to at least one epitope on Gi24. For example, VL1 may specifically bind to at least one epitope on GITR. For example, VL1 may specifically bind to at least one epitope on GITRL. For example, VL1 may specifically bind to at least one epitope on GPR5. For example, VL1 may specifically bind to at least one epitope on HER2. For example, VL1 may specifically bind to at least one epitope on HER3. For example, VL1 may specifically bind to at least one epitope on ICOSL. For example, VL1 may specifically bind to at least one epitope on ICOS. For example, VL1 may specifically bind to at least one epitope on HHLA2. For example, VL1 may specifically bind to at least one epitope on HMGB1. For example, VL1 may specifically bind to at least one epitope on HVEM. For example, VL1 may specifically bind to at least one epitope on IDO. For example, VL1 may specifically bind to at least one epitope on IFNa. For example, VL1 may specifically bind to at least one epitope on IgE. For example, VL1 may specifically bind to at least one epitope on IGF1R. For example, VL1 may specifically bind to at least one epitope on IL2Rbeta. For example, VL1 may specifically bind to at least one epitope on ILL For example, VL1 may specifically bind to at least one epitope on ILIA. For example, VL1 may specifically bind to at least one epitope on IL1B. For example, VL1 may specifically bind to at least one epitope on IL1F10. For example, VL1 may specifically bind to at least one epitope on IL2. For example, VL1 may specifically bind to at least one epitope on IL4. For example, VL1 may specifically bind to at least one epitope on IL4Ra. For example, VL1 may specifically bind to at least one epitope on IL5. For example, VL1 may specifically bind to at least one epitope on IL5R. For example, VL1 may specifically bind to at least one epitope on IL6. For example, VL1 may specifically bind to at least one epitope on IL7. For example, VL1 may specifically bind to at least one epitope on IL7Ra. For example, VL1 may specifically bind to at least one epitope on IL8. For example, VL1 may specifically bind to at least one epitope on IL9. For example, VL1 may specifically bind to at least one epitope on IL9R. For example, VL1 may specifically bind to at least one epitope on IL10. For example, VL1 may specifically bind to at least one epitope on rhIL10. For example, VL1 may specifically bind to at least one epitope on IL12. For example, VL1 may specifically bind to at least one epitope on IL13. For example, VL1 may specifically bind to at least one epitope on IL13Ra1. For example, VL1 may specifically bind to at least one epitope on IL13Ra2. For example, VL1 may specifically bind to at least one epitope on IL15. For example, VL1 may specifically bind to at least one epitope on IL17. For example, VL1 may specifically bind to at least one epitope on IL17Rb. For example, VL1 may specifically bind to at least one epitope on IL18. For example, VL1 may specifically bind to at least one epitope on IL22. For example, VL1 may specifically bind to at least one epitope on IL23. For example, VL1 may specifically bind to at least one epitope on IL25. For example, VL1 may specifically bind to at least one epitope on IL7. For example, VL1 may specifically bind to at least one epitope on IL33. For example, VL1 may specifically bind to at least one epitope on IL35. For example, VL1 may specifically bind to at least one epitope on ITGB4. For example, VL1 may specifically bind to at least one epitope on ITK. For example, VL1 may specifically bind to at least one epitope on KIR. For example, VL1 may specifically bind to at least one epitope on LAG3. For example, VL1 may specifically bind to at least one epitope on LAMP 1. For example, VL1 may specifically bind to at least one epitope on leptin. For example, VL1 may specifically bind to at least one epitope on LPFS2. For example, VL1 may specifically bind to at least one epitope on MHC class II. For example, VL1 may specifically bind to at least one epitope on MUC-1. For example, VL1 may specifically bind to at least one epitope on MUC-16. For example, VL1 may specifically bind to at least one epitope on NCR3LG1. For example, VL1 may specifically bind to at least one epitope on NKG2D. For example, VL1 may specifically bind to at least one epitope on NKp46. For example, VL1 may specifically bind to at least one epitope on NTPDase-1. For example, VL1 may specifically bind to at least one epitope on OX40. For example, VL1 may specifically bind to at least one epitope on OX40L. For example, VL1 may specifically bind to at least one epitope on PD-1. For example, VL1 may specifically bind to at least one epitope on PD-L1. For example, VL1 may specifically bind to at least one epitope on PD-L2. For example, VL1 may specifically bind to at least one epitope on PROM1. For example, VL1 may specifically bind to at least one epitope on S152. For example, VL1 may specifically bind to at least one epitope on SIRPalpha. For example, VL1 may specifically bind to at least one epitope on SISP1. For example, VL1 may specifically bind to at least one epitope on SLC. For example, VL1 may specifically bind to at least one epitope on SPG64. For example, VL1 may specifically bind to at least one epitope on ST2. For example, VL1 may specifically bind to at least one epitope on STEAP1. For example, VL1 may specifically bind to at least one epitope on STEAP2. For example, VL1 may specifically bind to at least one epitope on Syk kinase. For example, VL1 may specifically bind to at least one epitope on STEAP1. For example, VL1 may specifically bind to at least one epitope on TROP2. For example, VL1 may specifically bind to at least one epitope on TACI. For example, VL1 may specifically bind to at least one epitope on TDO. For example, VL1 may specifically bind to at least one epitope on T14. For example, VL1 may specifically bind to at least one epitope on TIGIT. For example, VL1 may specifically bind to at least one epitope on TIM3. For example, VL1 may specifically bind to at least one epitope on TLR. For example, VL1 may specifically bind to at least one epitope on TLR2. For example, VL1 may specifically bind to at least one epitope on TLR4. For example, VL1 may specifically bind to at least one epitope on TLR5. For example, VL1 may specifically bind to at least one epitope on TLR9. For example, VL1 may specifically bind to at least one epitope on TMEF1. For example, VL1 may specifically bind to at least one epitope on TNFa. For example, VL1 may specifically bind to at least one epitope on TNFRSF7. For example, VL1 may specifically bind to at least one epitope on Tp55. For example, VL1 may specifically bind to at least one epitope on TREM1. For example, VL1 may specifically bind to at least one epitope on TSLP. For example, VL1 may specifically bind to at least one epitope on TSLPR. For example, VL1 may specifically bind to at least one epitope on TWEAK. For example, VL1 may specifically bind to at least one epitope on VEGF. For example, VL1 may specifically bind to at least one epitope on VISTA. For example, VL1 may specifically bind to at least one epitope on Vstm3. For example, VL1 may specifically bind to at least one epitope on WUCAM. For example, VL1 may specifically bind to at least one epitope on CD16A. For example, VL1 may specifically bind to at least one epitope on CD30. For example, VL1 may specifically bind to at least one epitope on DLL4. For example, VL1 may specifically bind to at least one epitope on GP100. For example, VL1 may specifically bind to at least one epitope on GPRC5D. For example, VL1 may specifically bind to at least one epitope on TGFbeta.

[0254] In some aspects of an antigen binding polypeptide or antigen binding polypeptide complex of the invention, VL2 is a second immunoglobulin light chain variable region that specifically binds to at least one epitope on at least one antigen selected from the group consisting of A2AR, APRIL, ATPDase, BAFF, BAFFR, BCMA, BlyS, BTK, BTLA, B7DC, B7H1, B7H2, B7H3, B7H4, B7H5, B7H6, B7H7, B7RP1, B7-4, C3, C5, CCL2, CCL3, CCL4, CCL5, CCL7, CCL8, CCL11, CCL15, CCL17, CCL19, CCL20, CCL21, CCL25 CCR3, CCR4, CD3, CD16A, CD19, CD20, CD24, CD27, CD28, CD30, CD38, CD39, CD40, CD40L, CD47, CD52, CD70, CD80, CD86, CD123, CD133, CD137, CD137L, CD160, CD272, CEACAM5, CLEC9, CLEC91, CRTH2, CSF-1, CSF-2, CSF-3, CXCL1, CXCL2, CXCL4, CXCL12, CXCL13, CXCR3, cMet, CTLA4, DLL3, DLL4, DNGR-1, E-cadherin, EGFR, ENTPD1, EpCAM, FCER1, FCER1A, FCER2, FGFR, FLAP, FOLH1, Gi24, GITR, GITRL, GPR5, GP100, GPRC5D, HER2, HER3, ICOSL, ICOS, HHLA2, HMGB1, HVEM, IDO, IFNa, IgE, IGF1R, IL2Rbeta, IL1, ILIA, IL1B, IL1F10, IL2, IL4, IL4Ra, IL5, IL5R, IL6, IL7, IL7Ra, IL8, IL9, IL9R, IL10, rhIL1O, IL12, IL13, IL13Ra1, IL13Ra2, IL15, IL17, IL17Rb, IL18, IL22, IL23, IL25, IL7, IL33, IL35, ITGB4, ITK, KIR, LAG3, LAMP1, leptin, LPFS2, MHC class II, MUC-1, MUC-16, NCR3LG1, NKG2D, NKp46, NTPDase-1, OX40, OX40L, PD-1, PD-L1, PD-L2, PROM1, S152, SIRPalpha, SISP1, SLC, SPG64, ST2, STEAP1, STEAP2, Syk kinase, STEAP1, TROP2, TACI, TDO, TGFBETA, T14, TIGIT, TIM3, TLR, TLR2, TLR4, TLR5, TLR9, TMEF1, TNFa, TNFRSF7, Tp55, TREM1, TSLP, TSLPR, TWEAK, VEGF, VISTA, Vstm3, or WUCAM. For example, VL2 may specifically bind to at least one epitope on A2AR. For example, VL2 may specifically bind to at least one epitope on APRIL. For example, VL2 may specifically bind to at least one epitope on ATPDase. For example, VL2 may specifically bind to at least one epitope on BAFF. For example, VL2 may specifically bind to at least one epitope on BAFFR. For example, VL2 may specifically bind to at least one epitope on BCMA. For example, VL2 may specifically bind to at least one epitope on BlyS. For example, VL2 may specifically bind to at least one epitope on BTK. For example, VL2 may specifically bind to at least one epitope on BTLA. For example, VL2 may specifically bind to at least one epitope on B7DC. For example, VL2 may specifically bind to at least one epitope on B7H1. For example, VL2 may specifically bind to at least one epitope on B7H2. For example, VL2 may specifically bind to at least one epitope on B7H3. For example, VL2 may specifically bind to at least one epitope on B7H4. For example, VL2 may specifically bind to at least one epitope on B7H5. For example, VL2 may specifically bind to at least one epitope on B7H6. For example, VL2 may specifically bind to at least one epitope on B7H7. For example, VL2 may specifically bind to at least one epitope on B7RP1. For example, VL2 may specifically bind to at least one epitope on B7-4. For example, VL2 may specifically bind to at least one epitope on C3. For example, VL2 may specifically bind to at least one epitope on C5. For example, VL2 may specifically bind to at least one epitope on CCL2. For example, VL2 may specifically bind to at least one epitope on CCL3. For example, VL2 may specifically bind to at least one epitope on CCL4. For example, VL2 may specifically bind to at least one epitope on CCL5. For example, VL2 may specifically bind to at least one epitope on CCL7. For example, VL2 may specifically bind to at least one epitope on CCL8. For example, VL2 may specifically bind to at least one epitope on CCL11. For example, VL2 may specifically bind to at least one epitope on CCL15. For example, VL2 may specifically bind to at least one epitope on CCL17. For example, VL2 may specifically bind to at least one epitope on CCL19. For example, VL2 may specifically bind to at least one epitope on CCL20. For example, VL2 may specifically bind to at least one epitope on CCL21. For example, VL2 may specifically bind to at least one epitope on CCL25. For example, VL2 may specifically bind to at least one epitope on CCR3. For example, VL2 may specifically bind to at least one epitope on CCR4. For example, VL2 may specifically bind to at least one epitope on CD3. For example, VL2 may specifically bind to at least one epitope on CD19. For example, VL2 may specifically bind to at least one epitope on CD20. For example, VL2 may specifically bind to at least one epitope on CD24. For example, VL2 may specifically bind to at least one epitope on CD27. For example, VL2 may specifically bind to at least one epitope on CD28. For example, VL2 may specifically bind to at least one epitope on CD38. For example, VL2 may specifically bind to at least one epitope on CD39. For example, VL2 may specifically bind to at least one epitope on CD40. For example, VL2 may specifically bind to at least one epitope on CD40L. For example, VL2 may specifically bind to at least one epitope on CD47. For example, VL2 may specifically bind to at least one epitope on CD52. For example, VL2 may specifically bind to at least one epitope on CD70. For example, VL2 may specifically bind to at least one epitope on CD80. For example, VL2 may specifically bind to at least one epitope on CD86. For example, VL2 may specifically bind to at least one epitope on CD123. For example, VL2 may specifically bind to at least one epitope on CD133. For example, VL2 may specifically bind to at least one epitope on CD137. For example, VL2 may specifically bind to at least one epitope on CD137L. For example, VL2 may specifically bind to at least one epitope on CD160. For example, VL2 may specifically bind to at least one epitope on CD272. For example, VL2 may specifically bind to at least one epitope on CEACAM5. For example, VL2 may specifically bind to at least one epitope on CLEC9. For example, VL2 may specifically bind to at least one epitope on CLEC91. For example, VL2 may specifically bind to at least one epitope on CRTH2. For example, VL2 may specifically bind to at least one epitope on CSF-1. For example, VL2 may specifically bind to at least one epitope on CSF-2. For example, VL2 may specifically bind to at least one epitope on CSF-3. For example, VL2 may specifically bind to at least one epitope on CXCL1. For example, VL2 may specifically bind to at least one epitope on CXCL2. For example, VL2 may specifically bind to at least one epitope on CXCL4. For example, VL2 may specifically bind to at least one epitope on CXCL12. For example, VL2 may specifically bind to at least one epitope on CXCL13. For example, VL2 may specifically bind to at least one epitope on CXCR3. For example, VL2 may specifically bind to at least one epitope on cMet. For example, VL2 may specifically bind to at least one epitope on CTLA4. For example, VL2 may specifically bind to at least one epitope on DLL3. For example, VL2 may specifically bind to at least one epitope on DNGR-1. For example, VL2 may specifically bind to at least one epitope on E-cadherin. For example, VL2 may specifically bind to at least one epitope on EGFR. For example, VL2 may specifically bind to at least one epitope on ENTPD1. For example, VL2 may specifically bind to at least one epitope on EpCAM. For example, VL2 may specifically bind to at least one epitope on FCER1. For example, VL2 may specifically bind to at least one epitope on FCER1A. For example, VL2 may specifically bind to at least one epitope on FCER2. For example, VL2 may specifically bind to at least one epitope on FGFR. For example, VL2 may specifically bind to at least one epitope on FLAP. For example, VL2 may specifically bind to at least one epitope on FOLH1. For example, VL2 may specifically bind to at least one epitope on Gi24. For example, VL2 may specifically bind to at least one epitope on GITR. For example, VL2 may specifically bind to at least one epitope on GITRL. For example, VL2 may specifically bind to at least one epitope on GPR5. For example, VL2 may specifically bind to at least one epitope on HER2. For example, VL2 may specifically bind to at least one epitope on HER3. For example, VL2 may specifically bind to at least one epitope on ICOSL. For example, VL2 may specifically bind to at least one epitope on ICOS. For example, VL2 may specifically bind to at least one epitope on HHLA2. For example, VL2 may specifically bind to at least one epitope on HMGB1. For example, VL2 may specifically bind to at least one epitope on HVEM. For example, VL2 may specifically bind to at least one epitope on IDO. For example, VL2 may specifically bind to at least one epitope on IFNa. For example, VL2 may specifically bind to at least one epitope on IgE. For example, VL2 may specifically bind to at least one epitope on IGF1R. For example, VL2 may specifically bind to at least one epitope on IL2Rbeta. For example, VL2 may specifically bind to at least one epitope on ILL For example, VL2 may specifically bind to at least one epitope on ILIA. For example, VL2 may specifically bind to at least one epitope on IL1B. For example, VL2 may specifically bind to at least one epitope on IL1F10. For example, VL2 may specifically bind to at least one epitope on IL2. For example, VL2 may specifically bind to at least one epitope on IL4. For example, VL2 may specifically bind to at least one epitope on IL4Ra. For example, VL2 may specifically bind to at least one epitope on IL5. For example, VL2 may specifically bind to at least one epitope on IL5R. For example, VL2 may specifically bind to at least one epitope on IL6. For example, VL2 may specifically bind to at least one epitope on IL7. For example, VL2 may specifically bind to at least one epitope on IL7Ra. For example, VL2 may specifically bind to at least one epitope on IL8. For example, VL2 may specifically bind to at least one epitope on IL9. For example, VL2 may specifically bind to at least one epitope on IL9R. For example, VL2 may specifically bind to at least one epitope on IL10. For example, VL2 may specifically bind to at least one epitope on rhIL10. For example, VL2 may specifically bind to at least one epitope on IL12. For example, VL2 may specifically bind to at least one epitope on IL13. For example, VL2 may specifically bind to at least one epitope on IL13Ra1. For example, VL2 may specifically bind to at least one epitope on IL13Ra2. For example, VL2 may specifically bind to at least one epitope on IL15. For example, VL2 may specifically bind to at least one epitope on IL17. For example, VL2 may specifically bind to at least one epitope on IL17Rb. For example, VL2 may specifically bind to at least one epitope on IL18. For example, VL2 may specifically bind to at least one epitope on IL22. For example, VL2 may specifically bind to at least one epitope on IL23. For example, VL2 may specifically bind to at least one epitope on IL25. For example, VL2 may specifically bind to at least one epitope on IL7. For example, VL2 may specifically bind to at least one epitope on IL33. For example, VL2 may specifically bind to at least one epitope on IL35. For example, VL2 may specifically bind to at least one epitope on ITGB4. For example, VL2 may specifically bind to at least one epitope on ITK. For example, VL2 may specifically bind to at least one epitope on KIR. For example, VL2 may specifically bind to at least one epitope on LAG3. For example, VL2 may specifically bind to at least one epitope on LAMP1. For example, VL2 may specifically bind to at least one epitope on leptin. For example, VL2 may specifically bind to at least one epitope on LPFS2. For example, VL2 may specifically bind to at least one epitope on MHC class II. For example, VL2 may specifically bind to at least one epitope on MUC-1. For example, VL2 may specifically bind to at least one epitope on MUC-16. For example, VL2 may specifically bind to at least one epitope on NCR3LG1. For example, VL2 may specifically bind to at least one epitope on NKG2D. For example, VL2 may specifically bind to at least one epitope on NKp46. For example, VL2 may specifically bind to at least one epitope on NTPDase-1. For example, VL2 may specifically bind to at least one epitope on OX40. For example, VL2 may specifically bind to at least one epitope on OX40L. For example, VL2 may specifically bind to at least one epitope on PD-1. For example, VL2 may specifically bind to at least one epitope on PD-L1. For example, VL2 may specifically bind to at least one epitope on PD-L2. For example, VL2 may specifically bind to at least one epitope on PROM1. For example, VL2 may specifically bind to at least one epitope on S152. For example, VL2 may specifically bind to at least one epitope on SIRPalpha. For example, VL2 may specifically bind to at least one epitope on SISP1. For example, VL2 may specifically bind to at least one epitope on SLC. For example, VL2 may specifically bind to at least one epitope on SPG64. For example, VL2 may specifically bind to at least one epitope on ST2. For example, VL2 may specifically bind to at least one epitope on STEAP1. For example, VL2 may specifically bind to at least one epitope on STEAP2. For example, VL2 may specifically bind to at least one epitope on Syk kinase. For example, VL2 may specifically bind to at least one epitope on STEAP1. For example, VL2 may specifically bind to at least one epitope on TROP2. For example, VL2 may specifically bind to at least one epitope on TACI. For example, VL2 may specifically bind to at least one epitope on TDO. For example, VL2 may specifically bind to at least one epitope on T14. For example, VL2 may specifically bind to at least one epitope on TIGIT. For example, VL2 may specifically bind to at least one epitope on TIM3. For example, VL2 may specifically bind to at least one epitope on TLR. For example, VL2 may specifically bind to at least one epitope on TLR2. For example, VL2 may specifically bind to at least one epitope on TLR4. For example, VL2 may specifically bind to at least one epitope on TLR5. For example, VL2 may specifically bind to at least one epitope on TLR9. For example, VL2 may specifically bind to at least one epitope on TMEF1. For example, VL2 may specifically bind to at least one epitope on TNFa. For example, VL2 may specifically bind to at least one epitope on TNFRSF7. For example, VL2 may specifically bind to at least one epitope on Tp55. For example, VL2 may specifically bind to at least one epitope on TREM1. For example, VL2 may specifically bind to at least one epitope on TSLP. For example, VL2 may specifically bind to at least one epitope on TSLPR. For example, VL2 may specifically bind to at least one epitope on TWEAK. For example, VL2 may specifically bind to at least one epitope on VEGF. For example, VL2 may specifically bind to at least one epitope on VISTA. For example, VL2 may specifically bind to at least one epitope on Vstm3. For example, VL2 may specifically bind to at least one epitope on WUCAM. For example, VL2 may specifically bind to at least one epitope on CD16A. For example, VL2 may specifically bind to at least one epitope on CD30. For example, VL2 may specifically bind to at least one epitope on DLL4. For example, VL2 may specifically bind to at least one epitope on GP100. For example, VL2 may specifically bind to at least one epitope on GPRC5D. For example, VL2 may specifically bind to at least one epitope on TGFbeta.

[0255] In some aspects of an antigen binding polypeptide or antigen binding polypeptide complex of the invention, VL3 is a third immunoglobulin light chain variable region that specifically binds to at least one epitope on at least one antigen selected from the group consisting of A2AR, APRIL, ATPDase, BAFF, BAFFR, BCMA, BlyS, BTK, BTLA, B7DC, B7H1, B7H2, B7H3, B7H4, B7H5, B7H6, B7H7, B7RP1, B7-4, C3, C5, CCL2, CCL3, CCL4, CCL5, CCL7, CCL8, CCL11, CCL15, CCL17, CCL19, CCL20, CCL21, CCL25 CCR3, CCR4, CD3, CD16A, CD19, CD20, CD24, CD27, CD28, CD30, CD38, CD39, CD40, CD40L, CD47, CD52, CD70, CD80, CD86, CD123, CD133, CD137, CD137L, CD160, CD272, CEACAM5, CLEC9, CLEC91, CRTH2, CSF-1, CSF-2, CSF-3, CXCL1, CXCL2, CXCL4, CXCL12, CXCL13, CXCR3, cMet, CTLA4, DLL3, DLL4, DNGR-1, E-cadherin, EGFR, ENTPD1, EpCAM, FCER1, FCER1A, FCER2, FGFR, FLAP, FOLH1, Gi24, GITR, GITRL, GPR5, GP100, GPRC5D, HER2, HER3, ICOSL, ICOS, HHLA2, HMGB1, HVEM, IDO, IFNa, IgE, IGF1R, IL2Rbeta, IL1, ILIA, IL1B, IL1F10, IL2, IL4, IL4Ra, IL5, IL5R, IL6, IL7, IL7Ra, IL8, IL9, IL9R, IL10, rhIL1O, IL12, IL13, IL13Ra1, IL13Ra2, IL15, IL17, IL17Rb, IL18, IL22, IL23, IL25, IL7, IL33, IL35, ITGB4, ITK, KIR, LAG3, LAMP1, leptin, LPFS2, MHC class II, MUC-1, MUC-16, NCR3LG1, NKG2D, NKp46, NTPDase-1, OX40, OX40L, PD-1, PD-L1, PD-L2, PROM1, S152, SIRPalpha, SISP1, SLC, SPG64, ST2, STEAP1, STEAP2, Syk kinase, STEAP1, TROP2, TACI, TDO, TGFBETA, T14, TIGIT, TIM3, TLR, TLR2, TLR4, TLR5, TLR9, TMEF1, TNFa, TNFRSF7, Tp55, TREM1, TSLP, TSLPR, TWEAK, VEGF, VISTA, Vstm3, and WUCAM. For example, VL3 may specifically bind to at least one epitope on A2AR. For example, VL3 may specifically bind to at least one epitope on APRIL. For example, VL3 may specifically bind to at least one epitope on ATPDase. For example, VL3 may specifically bind to at least one epitope on BAFF. For example, VL3 may specifically bind to at least one epitope on BAFFR. For example, VL3 may specifically bind to at least one epitope on BCMA. For example, VL3 may specifically bind to at least one epitope on BlyS. For example, VL3 may specifically bind to at least one epitope on BTK. For example, VL3 may specifically bind to at least one epitope on BTLA. For example, VL3 may specifically bind to at least one epitope on B7DC. For example, VL3 may specifically bind to at least one epitope on B7H1. For example, VL3 may specifically bind to at least one epitope on B7H2. For example, VL3 may specifically bind to at least one epitope on B7H3. For example, VL3 may specifically bind to at least one epitope on B7H4. For example, VL3 may specifically bind to at least one epitope on B7H5. For example, VL3 may specifically bind to at least one epitope on B7H6. For example, VL3 may specifically bind to at least one epitope on B7H7. For example, VL3 may specifically bind to at least one epitope on B7RP1. For example, VL3 may specifically bind to at least one epitope on B7-4. For example, VL3 may specifically bind to at least one epitope on C3. For example, VL3 may specifically bind to at least one epitope on C5. For example, VL3 may specifically bind to at least one epitope on CCL2. For example, VL3 may specifically bind to at least one epitope on CCL3. For example, VL3 may specifically bind to at least one epitope on CCL4. For example, VL3 may specifically bind to at least one epitope on CCL5. For example, VL3 may specifically bind to at least one epitope on CCL7. For example, VL3 may specifically bind to at least one epitope on CCL8. For example, VL3 may specifically bind to at least one epitope on CCL11. For example, VL3 may specifically bind to at least one epitope on CCL15. For example, VL3 may specifically bind to at least one epitope on CCL17. For example, VL3 may specifically bind to at least one epitope on CCL19. For example, VL3 may specifically bind to at least one epitope on CCL20. For example, VL3 may specifically bind to at least one epitope on CCL21. For example, VL3 may specifically bind to at least one epitope on CCL25. For example, VL3 may specifically bind to at least one epitope on CCR3. For example, VL3 may specifically bind to at least one epitope on CCR4. For example, VL3 may specifically bind to at least one epitope on CD3. For example, VL3 may specifically bind to at least one epitope on CD19. For example, VL3 may specifically bind to at least one epitope on CD20. For example, VL3 may specifically bind to at least one epitope on CD24. For example, VL3 may specifically bind to at least one epitope on CD27. For example, VL3 may specifically bind to at least one epitope on CD28. For example, VL3 may specifically bind to at least one epitope on CD38. For example, VL3 may specifically bind to at least one epitope on CD39. For example, VL3 may specifically bind to at least one epitope on CD40. For example, VL3 may specifically bind to at least one epitope on CD40L. For example, VL3 may specifically bind to at least one epitope on CD47. For example, VL3 may specifically bind to at least one epitope on CD52. For example, VL3 may specifically bind to at least one epitope on CD70. For example, VL3 may specifically bind to at least one epitope on CD80. For example, VL3 may specifically bind to at least one epitope on CD86. For example, VL3 may specifically bind to at least one epitope on CD123. For example, VL3 may specifically bind to at least one epitope on CD133. For example, VL3 may specifically bind to at least one epitope on CD137. For example, VL3 may specifically bind to at least one epitope on CD137L. For example, VL3 may specifically bind to at least one epitope on CD160. For example, VL3 may specifically bind to at least one epitope on CD272. For example, VL3 may specifically bind to at least one epitope on CEACAM5. For example, VL3 may specifically bind to at least one epitope on CLEC9. For example, VL3 may specifically bind to at least one epitope on CLEC91. For example, VL3 may specifically bind to at least one epitope on CRTH2. For example, VL3 may specifically bind to at least one epitope on CSF-1. For example, VL3 may specifically bind to at least one epitope on CSF-2. For example, VL3 may specifically bind to at least one epitope on CSF-3. For example, VL3 may specifically bind to at least one epitope on CXCL1. For example, VL3 may specifically bind to at least one epitope on CXCL2. For example, VL3 may specifically bind to at least one epitope on CXCL4. For example, VL3 may specifically bind to at least one epitope on CXCL12. For example, VL3 may specifically bind to at least one epitope on CXCL13. For example, VL3 may specifically bind to at least one epitope on CXCR3. For example, VL3 may specifically bind to at least one epitope on cMet. For example, VL3 may specifically bind to at least one epitope on CTLA4. For example, VL3 may specifically bind to at least one epitope on DLL3. For example, VL3 may specifically bind to at least one epitope on DNGR-1. For example, VL3 may specifically bind to at least one epitope on E-cadherin. For example, VL3 may specifically bind to at least one epitope on EGFR. For example, VL3 may specifically bind to at least one epitope on ENTPD1. For example, VL3 may specifically bind to at least one epitope on EpCAM. For example, VL3 may specifically bind to at least one epitope on FCER1. For example, VL3 may specifically bind to at least one epitope on FCER1A. For example, VL3 may specifically bind to at least one epitope on FCER2. For example, VL3 may specifically bind to at least one epitope on FGFR. For example, VL3 may specifically bind to at least one epitope on FLAP. For example, VL3 may specifically bind to at least one epitope on FOLH1. For example, VL3 may specifically bind to at least one epitope on Gi24. For example, VL3 may specifically bind to at least one epitope on GITR. For example, VL3 may specifically bind to at least one epitope on GITRL. For example, VL3 may specifically bind to at least one epitope on GPR5. For example, VL3 may specifically bind to at least one epitope on HER2. For example, VL3 may specifically bind to at least one epitope on HER3. For example, VL3 may specifically bind to at least one epitope on ICOSL. For example, VL3 may specifically bind to at least one epitope on ICOS. For example, VL3 may specifically bind to at least one epitope on HHLA2. For example, VL3 may specifically bind to at least one epitope on HMGB1. For example, VL3 may specifically bind to at least one epitope on HVEM. For example, VL3 may specifically bind to at least one epitope on IDO. For example, VL3 may specifically bind to at least one epitope on IFNa. For example, VL3 may specifically bind to at least one epitope on IgE. For example, VL3 may specifically bind to at least one epitope on IGF1R. For example, VL3 may specifically bind to at least one epitope on IL2Rbeta. For example, VL3 may specifically bind to at least one epitope on ILL For example, VL3 may specifically bind to at least one epitope on ILIA. For example, VL3 may specifically bind to at least one epitope on IL1B. For example, VL3 may specifically bind to at least one epitope on IL1F10. For example, VL3 may specifically bind to at least one epitope on IL2. For example, VL3 may specifically bind to at least one epitope on IL4. For example, VL3 may specifically bind to at least one epitope on IL4Ra. For example, VL3 may specifically bind to at least one epitope on IL5. For example, VL3 may specifically bind to at least one epitope on IL5R. For example, VL3 may specifically bind to at least one epitope on IL6. For example, VL3 may specifically bind to at least one epitope on IL7. For example, VL3 may specifically bind to at least one epitope on IL7Ra. For example, VL3 may specifically bind to at least one epitope on IL8. For example, VL3 may specifically bind to at least one epitope on IL9. For example, VL3 may specifically bind to at least one epitope on IL9R. For example, VL3 may specifically bind to at least one epitope on IL10. For example, VL3 may specifically bind to at least one epitope on rhIL10. For example, VL3 may specifically bind to at least one epitope on IL12. For example, VL3 may specifically bind to at least one epitope on IL13. For example, VL3 may specifically bind to at least one epitope on IL13Ra1. For example, VL3 may specifically bind to at least one epitope on IL13Ra2. For example, VL3 may specifically bind to at least one epitope on IL15. For example, VL3 may specifically bind to at least one epitope on IL17. For example, VL3 may specifically bind to at least one epitope on IL17Rb. For example, VL3 may specifically bind to at least one epitope on IL18. For example, VL3 may specifically bind to at least one epitope on IL22. For example, VL3 may specifically bind to at least one epitope on IL23. For example, VL3 may specifically bind to at least one epitope on IL25. For example, VL3 may specifically bind to at least one epitope on IL7. For example, VL3 may specifically bind to at least one epitope on IL33. For example, VL3 may specifically bind to at least one epitope on IL35. For example, VL3 may specifically bind to at least one epitope on ITGB4. For example, VL3 may specifically bind to at least one epitope on ITK. For example, VL3 may specifically bind to at least one epitope on KIR. For example, VL3 may specifically bind to at least one epitope on LAG3. For example, VL3 may specifically bind to at least one epitope on LAMP 1. For example, VL3 may specifically bind to at least one epitope on leptin. For example, VL3 may specifically bind to at least one epitope on LPFS2. For example, VL3 may specifically bind to at least one epitope on MHC class II. For example, VL3 may specifically bind to at least one epitope on MUC-1. For example, VL3 may specifically bind to at least one epitope on MUC-16. For example, VL3 may specifically bind to at least one epitope on NCR3LG1. For example, VL3 may specifically bind to at least one epitope on NKG2D. For example, VL3 may specifically bind to at least one epitope on NKp46. For example, VL3 may specifically bind to at least one epitope on NTPDase-1. For example, VL3 may specifically bind to at least one epitope on OX40. For example, VL3 may specifically bind to at least one epitope on OX40L. For example, VL3 may specifically bind to at least one epitope on PD-1. For example, VL3 may specifically bind to at least one epitope on PD-L1. For example, VL3 may specifically bind to at least one epitope on PD-L2. For example, VL3 may specifically bind to at least one epitope on PROM1. For example, VL3 may specifically bind to at least one epitope on S152. For example, VL3 may specifically bind to at least one epitope on SIRPalpha. For example, VL3 may specifically bind to at least one epitope on SISP1. For example, VL3 may specifically bind to at least one epitope on SLC. For example, VL3 may specifically bind to at least one epitope on SPG64. For example, VL3 may specifically bind to at least one epitope on ST2. For example, VL3 may specifically bind to at least one epitope on STEAP1. For example, VL3 may specifically bind to at least one epitope on STEAP2. For example, VL3 may specifically bind to at least one epitope on Syk kinase. For example, VL3 may specifically bind to at least one epitope on STEAP1. For example, VL3 may specifically bind to at least one epitope on TROP2. For example, VL3 may specifically bind to at least one epitope on TACI. For example, VL3 may specifically bind to at least one epitope on TDO. For example, VL3 may specifically bind to at least one epitope on T14. For example, VL3 may specifically bind to at least one epitope on TIGIT. For example, VL3 may specifically bind to at least one epitope on TIM3. For example, VL3 may specifically bind to at least one epitope on TLR. For example, VL3 may specifically bind to at least one epitope on TLR2. For example, VL3 may specifically bind to at least one epitope on TLR4. For example, VL3 may specifically bind to at least one epitope on TLR5. For example, VL3 may specifically bind to at least one epitope on TLR9. For example, VL3 may specifically bind to at least one epitope on TMEF1. For example, VL3 may specifically bind to at least one epitope on TNFa. For example, VL3 may specifically bind to at least one epitope on TNFRSF7. For example, VL3 may specifically bind to at least one epitope on Tp55. For example, VL3 may specifically bind to at least one epitope on TREM1. For example, VL3 may specifically bind to at least one epitope on TSLP. For example, VL3 may specifically bind to at least one epitope on TSLPR. For example, VL3 may specifically bind to at least one epitope on TWEAK. For example, VL3 may specifically bind to at least one epitope on VEGF. For example, VL3 may specifically bind to at least one epitope on VISTA. For example, VL3 may specifically bind to at least one epitope on Vstm3. For example, VL3 may specifically bind to at least one epitope on WUCAM. For example, VL3 may specifically bind to at least one epitope on CD16A. For example, VL3 may specifically bind to at least one epitope on CD30. For example, VL3 may specifically bind to at least one epitope on DLL4. For example, VL3 may specifically bind to at least one epitope on GP100. For example, VL3 may specifically bind to at least one epitope on GPRC5D. For example, VL3 may specifically bind to at least one epitope on TGFbeta.

[0256] In some aspects of an antigen binding polypeptide or antigen binding polypeptide complex of the invention, VL4 is a fourth immunoglobulin light chain variable region that specifically binds to at least one epitope on at least one antigen selected from the group consisting of A2AR, APRIL, ATPDase, BAFF, BAFFR, BCMA, BlyS, BTK, BTLA, B7DC, B7H1, B7H2, B7H3, B7H4, B7H5, B7H6, B7H7, B7RP1, B7-4, C3, C5, CCL2, CCL3, CCL4, CCL5, CCL7, CCL8, CCL11, CCL15, CCL17, CCL19, CCL20, CCL21, CCL25 CCR3, CCR4, CD3, CD16A, CD19, CD20, CD24, CD27, CD28, CD30, CD38, CD39, CD40, CD40L, CD47, CD52, CD70, CD80, CD86, CD123, CD133, CD137, CD137L, CD160, CD272, CEACAM5, CLEC9, CLEC91, CRTH2, CSF-1, CSF-2, CSF-3, CXCL1, CXCL2, CXCL4, CXCL12, CXCL13, CXCR3, cMet, CTLA4, DLL3, DLL4, DNGR-1, E-cadherin, EGFR, ENTPD1, EpCAM, FCER1, FCER1A, FCER2, FGFR, FLAP, FOLH1, Gi24, GITR, GITRL, GPR5, GP100, GPRC5D, HER2, HER3, ICOSL, ICOS, HHLA2, HMGB1, HVEM, IDO, IFNa, IgE, IGF1R, IL2Rbeta, IL1, ILIA, IL1B, IL1F10, IL2, IL4, IL4Ra, IL5, IL5R, IL6, IL7, IL7Ra, IL8, IL9, IL9R, IL10, rhIL1O, IL12, IL13, IL13Ra1, IL13Ra2, IL15, IL17, IL17Rb, IL18, IL22, IL23, IL25, IL7, IL33, IL35, ITGB4, ITK, KIR, LAG3, LAMP1, leptin, LPFS2, MHC class II, MUC-1, MUC-16, NCR3LG1, NKG2D, NKp46, NTPDase-1, OX40, OX40L, PD-1, PD-L1, PD-L2, PROM1, S152, SIRPalpha, SISP1, SLC, SPG64, ST2, STEAP1, STEAP2, Syk kinase, STEAP1, TROP2, TACI, TDO, TGFBETA, T14, TIGIT, TIM3, TLR, TLR2, TLR4, TLR5, TLR9, TMEF1, TNFa, TNFRSF7, Tp55, TREM1, TSLP, TSLPR, TWEAK, VEGF, VISTA, Vstm3, and WUCAM. For example, VL4 may specifically bind to at least one epitope on A2AR. For example, VL4 may specifically bind to at least one epitope on APRIL. For example, VL4 may specifically bind to at least one epitope on ATPDase. For example, VL4 may specifically bind to at least one epitope on BAFF. For example, VL4 may specifically bind to at least one epitope on BAFFR. For example, VL4 may specifically bind to at least one epitope on BCMA. For example, VL4 may specifically bind to at least one epitope on BlyS. For example, VL4 may specifically bind to at least one epitope on BTK. For example, VL4 may specifically bind to at least one epitope on BTLA. For example, VL4 may specifically bind to at least one epitope on B7DC. For example, VL4 may specifically bind to at least one epitope on B7H1. For example, VL4 may specifically bind to at least one epitope on B7H2. For example, VL4 may specifically bind to at least one epitope on B7H3. For example, VL4 may specifically bind to at least one epitope on B7H4. For example, VL4 may specifically bind to at least one epitope on B7H5. For example, VL4 may specifically bind to at least one epitope on B7H6. For example, VL4 may specifically bind to at least one epitope on B7H7. For example, VL4 may specifically bind to at least one epitope on B7RP1. For example, VL4 may specifically bind to at least one epitope on B7-4. For example, VL4 may specifically bind to at least one epitope on C3. For example, VL4 may specifically bind to at least one epitope on C5. For example, VL4 may specifically bind to at least one epitope on CCL2. For example, VL4 may specifically bind to at least one epitope on CCL3. For example, VL4 may specifically bind to at least one epitope on CCL4. For example, VL4 may specifically bind to at least one epitope on CCL5. For example, VL4 may specifically bind to at least one epitope on CCL7. For example, VL4 may specifically bind to at least one epitope on CCL8. For example, VL4 may specifically bind to at least one epitope on CCL11. For example, VL4 may specifically bind to at least one epitope on CCL15. For example, VL4 may specifically bind to at least one epitope on CCL17. For example, VL4 may specifically bind to at least one epitope on CCL19. For example, VL4 may specifically bind to at least one epitope on CCL20. For example, VL4 may specifically bind to at least one epitope on CCL21. For example, VL4 may specifically bind to at least one epitope on CCL25. For example, VL4 may specifically bind to at least one epitope on CCR3. For example, VL4 may specifically bind to at least one epitope on CCR4. For example, VL4 may specifically bind to at least one epitope on CD3. For example, VL4 may specifically bind to at least one epitope on CD19. For example, VL4 may specifically bind to at least one epitope on CD20. For example, VL4 may specifically bind to at least one epitope on CD24. For example, VL4 may specifically bind to at least one epitope on CD27. For example, VL4 may specifically bind to at least one epitope on CD28. For example, VL4 may specifically bind to at least one epitope on CD38. For example, VL4 may specifically bind to at least one epitope on CD39. For example, VL4 may specifically bind to at least one epitope on CD40. For example, VL4 may specifically bind to at least one epitope on CD40L. For example, VL4 may specifically bind to at least one epitope on CD47. For example, VL4 may specifically bind to at least one epitope on CD52. For example, VL4 may specifically bind to at least one epitope on CD70. For example, VL4 may specifically bind to at least one epitope on CD80. For example, VL4 may specifically bind to at least one epitope on CD86. For example, VL4 may specifically bind to at least one epitope on CD123. For example, VL4 may specifically bind to at least one epitope on CD133. For example, VL4 may specifically bind to at least one epitope on CD137. For example, VL4 may specifically bind to at least one epitope on CD137L. For example, VL4 may specifically bind to at least one epitope on CD160. For example, VL4 may specifically bind to at least one epitope on CD272. For example, VL4 may specifically bind to at least one epitope on CEACAM5. For example, VL4 may specifically bind to at least one epitope on CLEC9. For example, VL4 may specifically bind to at least one epitope on CLEC91. For example, VL4 may specifically bind to at least one epitope on CRTH2. For example, VL4 may specifically bind to at least one epitope on CSF-1. For example, VL4 may specifically bind to at least one epitope on CSF-2. For example, VL4 may specifically bind to at least one epitope on CSF-3. For example, VL4 may specifically bind to at least one epitope on CXCL1. For example, VL4 may specifically bind to at least one epitope on CXCL2. For example, VL4 may specifically bind to at least one epitope on CXCL4. For example, VL4 may specifically bind to at least one epitope on CXCL12. For example, VL4 may specifically bind to at least one epitope on CXCL13. For example, VL4 may specifically bind to at least one epitope on CXCR3. For example, VL4 may specifically bind to at least one epitope on cMet. For example, VL4 may specifically bind to at least one epitope on CTLA4. For example, VL4 may specifically bind to at least one epitope on DLL3. For example, VL4 may specifically bind to at least one epitope on DNGR-1. For example, VL4 may specifically bind to at least one epitope on E-cadherin. For example, VL4 may specifically bind to at least one epitope on EGFR. For example, VL4 may specifically bind to at least one epitope on ENTPD1. For example, VL4 may specifically bind to at least one epitope on EpCAM. For example, VL4 may specifically bind to at least one epitope on FCER1. For example, VL4 may specifically bind to at least one epitope on FCER1A. For example, VL4 may specifically bind to at least one epitope on FCER2. For example, VL4 may specifically bind to at least one epitope on FGFR. For example, VL4 may specifically bind to at least one epitope on FLAP. For example, VL4 may specifically bind to at least one epitope on FOLH1. For example, VL4 may specifically bind to at least one epitope on Gi24. For example, VL4 may specifically bind to at least one epitope on GITR. For example, VL4 may specifically bind to at least one epitope on GITRL. For example, VL4 may specifically bind to at least one epitope on GPR5. For example, VL4 may specifically bind to at least one epitope on HER2. For example, VL4 may specifically bind to at least one epitope on HER3. For example, VL4 may specifically bind to at least one epitope on ICOSL. For example, VL4 may specifically bind to at least one epitope on ICOS. For example, VL4 may specifically bind to at least one epitope on HHLA2. For example, VL4 may specifically bind to at least one epitope on HMGB1. For example, VL4 may specifically bind to at least one epitope on HVEM. For example, VL4 may specifically bind to at least one epitope on IDO. For example, VL4 may specifically bind to at least one epitope on IFNa. For example, VL4 may specifically bind to at least one epitope on IgE. For example, VL4 may specifically bind to at least one epitope on IGF1R. For example, VL4 may specifically bind to at least one epitope on IL2Rbeta. For example, VL4 may specifically bind to at least one epitope on ILL For example, VL4 may specifically bind to at least one epitope on ILIA. For example, VL4 may specifically bind to at least one epitope on IL1B. For example, VL4 may specifically bind to at least one epitope on IL1F10. For example, VL4 may specifically bind to at least one epitope on IL2. For example, VL4 may specifically bind to at least one epitope on IL4. For example, VL4 may specifically bind to at least one epitope on IL4Ra. For example, VL4 may specifically bind to at least one epitope on IL5. For example, VL4 may specifically bind to at least one epitope on IL5R. For example, VL4 may specifically bind to at least one epitope on IL6. For example, VL4 may specifically bind to at least one epitope on IL7. For example, VL4 may specifically bind to at least one epitope on IL7Ra. For example, VL4 may specifically bind to at least one epitope on IL8. For example, VL4 may specifically bind to at least one epitope on IL9. For example, VL4 may specifically bind to at least one epitope on IL9R. For example, VL4 may specifically bind to at least one epitope on IL10. For example, VL4 may specifically bind to at least one epitope on rhIL10. For example, VL4 may specifically bind to at least one epitope on IL12. For example, VL4 may specifically bind to at least one epitope on IL13. For example, VL4 may specifically bind to at least one epitope on IL13Ra1. For example, VL4 may specifically bind to at least one epitope on IL13Ra2. For example, VL4 may specifically bind to at least one epitope on IL15. For example, VL4 may specifically bind to at least one epitope on IL17. For example, VL4 may specifically bind to at least one epitope on IL17Rb. For example, VL4 may specifically bind to at least one epitope on IL18. For example, VL4 may specifically bind to at least one epitope on IL22. For example, VL4 may specifically bind to at least one epitope on IL23. For example, VL4 may specifically bind to at least one epitope on IL25. For example, VL4 may specifically bind to at least one epitope on IL7. For example, VL4 may specifically bind to at least one epitope on IL33. For example, VL4 may specifically bind to at least one epitope on IL35. For example, VL4 may specifically bind to at least one epitope on ITGB4. For example, VL4 may specifically bind to at least one epitope on ITK. For example, VL4 may specifically bind to at least one epitope on KIR. For example, VL4 may specifically bind to at least one epitope on LAG3. For example, VL4 may specifically bind to at least one epitope on LAMP 1. For example, VL4 may specifically bind to at least one epitope on leptin. For example, VL4 may specifically bind to at least one epitope on LPFS2. For example, VL4 may specifically bind to at least one epitope on MHC class II. For example, VL4 may specifically bind to at least one epitope on MUC-1. For example, VL4 may specifically bind to at least one epitope on MUC-16. For example, VL4 may specifically bind to at least one epitope on NCR3LG1. For example, VL4 may specifically bind to at least one epitope on NKG2D. For example, VL4 may specifically bind to at least one epitope on NKp46. For example, VL4 may specifically bind to at least one epitope on NTPDase-1. For example, VL4 may specifically bind to at least one epitope on OX40. For example, VL4 may specifically bind to at least one epitope on OX40L. For example, VL4 may specifically bind to at least one epitope on PD-1. For example, VL4 may specifically bind to at least one epitope on PD-L1. For example, VL4 may specifically bind to at least one epitope on PD-L2. For example, VL4 may specifically bind to at least one epitope on PROM1. For example, VL4 may specifically bind to at least one epitope on S152. For example, VL4 may specifically bind to at least one epitope on SIRPalpha. For example, VL4 may specifically bind to at least one epitope on SISP1. For example, VL4 may specifically bind to at least one epitope on SLC. For example, VL4 may specifically bind to at least one epitope on SPG64. For example, VL4 may specifically bind to at least one epitope on ST2. For example, VL4 may specifically bind to at least one epitope on STEAP1. For example, VL4 may specifically bind to at least one epitope on STEAP2. For example, VL4 may specifically bind to at least one epitope on Syk kinase. For example, VL4 may specifically bind to at least one epitope on STEAP1. For example, VL4 may specifically bind to at least one epitope on TROP2. For example, VL4 may specifically bind to at least one epitope on TACI. For example, VL4 may specifically bind to at least one epitope on TDO. For example, VL4 may specifically bind to at least one epitope on T14. For example, VL4 may specifically bind to at least one epitope on TIGIT. For example, VL4 may specifically bind to at least one epitope on TIM3. For example, VL4 may specifically bind to at least one epitope on TLR. For example, VL4 may specifically bind to at least one epitope on TLR2. For example, VL4 may specifically bind to at least one epitope on TLR4. For example, VL4 may specifically bind to at least one epitope on TLR5. For example, VL4 may specifically bind to at least one epitope on TLR9. For example, VL4 may specifically bind to at least one epitope on TMEF1. For example, VL4 may specifically bind to at least one epitope on TNFa. For example, VL4 may specifically bind to at least one epitope on TNFRSF7. For example, VL4 may specifically bind to at least one epitope on Tp55. For example, VL4 may specifically bind to at least one epitope on TREM1. For example, VL4 may specifically bind to at least one epitope on TSLP. For example, VL4 may specifically bind to at least one epitope on TSLPR. For example, VL4 may specifically bind to at least one epitope on TWEAK. For example, VL4 may specifically bind to at least one epitope on VEGF. For example, VL4 may specifically bind to at least one epitope on VISTA. For example, VL4 may specifically bind to at least one epitope on Vstm3. For example, VL4 may specifically bind to at least one epitope on WUCAM. For example, VL4 may specifically bind to at least one epitope on CD16A. For example, VL4 may specifically bind to at least one epitope on CD30. For example, VL4 may specifically bind to at least one epitope on DLL4. For example, VL4 may specifically bind to at least one epitope on GP100. For example, VL4 may specifically bind to at least one epitope on GPRC5D. For example, VL4 may specifically bind to at least one epitope on TGFbeta.

[0257] In some aspects of an antigen binding polypeptide or antigen binding polypeptide complex of the invention, VH1 is a first immunoglobulin heavy chain variable region that specifically binds to at least one epitope on at least one antigen selected from the group consisting of A2AR, APRIL, ATPDase, BAFF, BAFFR, BCMA, BlyS, BTK, BTLA, B7DC, B7H1, B7H2, B7H3, B7H4, B7H5, B7H6, B7H7, B7RP1, B7-4, C3, C5, CCL2, CCL3, CCL4, CCL5, CCL7, CCL8, CCL11, CCL15, CCL17, CCL19, CCL20, CCL21, CCL25 CCR3, CCR4, CD3, CD16A, CD19, CD20, CD24, CD27, CD28, CD30, CD38, CD39, CD40, CD40L, CD47, CD52, CD70, CD80, CD86, CD123, CD133, CD137, CD137L, CD160, CD272, CEACAM5, CLEC9, CLEC91, CRTH2, CSF-1, CSF-2, CSF-3, CXCL1, CXCL2, CXCL4, CXCL12, CXCL13, CXCR3, cMet, CTLA4, DLL3, DLL4, DNGR-1, E-cadherin, EGFR, ENTPD1, EpCAM, FCER1, FCER1A, FCER2, FGFR, FLAP, FOLH1, Gi24, GITR, GITRL, GPR5, GP100, GPRC5D, HER2, HER3, ICOSL, ICOS, HHLA2, HMGB1, HVEM, IDO, IFNa, IgE, IGF1R, IL2Rbeta, IL1, ILIA, IL1B, IL1F10, IL2, IL4, IL4Ra, IL5, IL5R, IL6, IL7, IL7Ra, IL8, IL9, IL9R, IL10, rhIL1O, IL12, IL13, IL13Ra1, IL13Ra2, IL15, IL17, IL17Rb, IL18, IL22, IL23, IL25, IL7, IL33, IL35, ITGB4, ITK, KIR, LAG3, LAMP1, leptin, LPFS2, MHC class II, MUC-1, MUC-16, NCR3LG1, NKG2D, NKp46, NTPDase-1, OX40, OX40L, PD-1, PD-L1, PD-L2, PROM1, S152, SIRPalpha, SISP1, SLC, SPG64, ST2, STEAP1, STEAP2, Syk kinase, STEAP1, TROP2, TACI, TDO, TGFBETA, T14, TIGIT, TIM3, TLR, TLR2, TLR4, TLR5, TLR9, TMEF1, TNFa, TNFRSF7, Tp55, TREM1, TSLP, TSLPR, TWEAK, VEGF, VISTA, Vstm3, and WUCAM. For example, VH1 may specifically bind to at least one epitope on A2AR. For example, VH1 may specifically bind to at least one epitope on APRIL. For example, VH1 may specifically bind to at least one epitope on ATPDase. For example, VH1 may specifically bind to at least one epitope on BAFF. For example, VH1 may specifically bind to at least one epitope on BAFFR. For example, VH1 may specifically bind to at least one epitope on BCMA. For example, VH1 may specifically bind to at least one epitope on BlyS. For example, VH1 may specifically bind to at least one epitope on BTK. For example, VH1 may specifically bind to at least one epitope on BTLA. For example, VH1 may specifically bind to at least one epitope on B7DC. For example, VH1 may specifically bind to at least one epitope on B7H1. For example, VH1 may specifically bind to at least one epitope on B7H2. For example, VH1 may specifically bind to at least one epitope on B7H3. For example, VH1 may specifically bind to at least one epitope on B7H4. For example, VH1 may specifically bind to at least one epitope on B7H5. For example, VH1 may specifically bind to at least one epitope on B7H6. For example, VH1 may specifically bind to at least one epitope on B7H7. For example, VH1 may specifically bind to at least one epitope on B7RP1. For example, VH1 may specifically bind to at least one epitope on B7-4. For example, VH1 may specifically bind to at least one epitope on C3. For example, VH1 may specifically bind to at least one epitope on C5. For example, VH1 may specifically bind to at least one epitope on CCL2. For example, VH1 may specifically bind to at least one epitope on CCL3. For example, VH1 may specifically bind to at least one epitope on CCL4. For example, VH1 may specifically bind to at least one epitope on CCL5. For example, VH1 may specifically bind to at least one epitope on CCL7. For example, VH1 may specifically bind to at least one epitope on CCL8. For example, VH1 may specifically bind to at least one epitope on CCL11. For example, VH1 may specifically bind to at least one epitope on CCL15. For example, VH1 may specifically bind to at least one epitope on CCL17. For example, VH1 may specifically bind to at least one epitope on CCL19. For example, VH1 may specifically bind to at least one epitope on CCL20. For example, VH1 may specifically bind to at least one epitope on CCL21. For example, VH1 may specifically bind to at least one epitope on CCL25. For example, VH1 may specifically bind to at least one epitope on CCR3. For example, VH1 may specifically bind to at least one epitope on CCR4. For example, VH1 may specifically bind to at least one epitope on CD3. For example, VH1 may specifically bind to at least one epitope on CD19. For example, VH1 may specifically bind to at least one epitope on CD20. For example, VH1 may specifically bind to at least one epitope on CD24. For example, VH1 may specifically bind to at least one epitope on CD27. For example, VH1 may specifically bind to at least one epitope on CD28. For example, VH1 may specifically bind to at least one epitope on CD38. For example, VH1 may specifically bind to at least one epitope on CD39. For example, VH1 may specifically bind to at least one epitope on CD40. For example, VH1 may specifically bind to at least one epitope on CD40L. For example, VH1 may specifically bind to at least one epitope on CD47. For example, VH1 may specifically bind to at least one epitope on CD52. For example, VH1 may specifically bind to at least one epitope on CD70. For example, VH1 may specifically bind to at least one epitope on CD80. For example, VH1 may specifically bind to at least one epitope on CD86. For example, VH1 may specifically bind to at least one epitope on CD123. For example, VH1 may specifically bind to at least one epitope on CD133. For example, VH1 may specifically bind to at least one epitope on CD137. For example, VH1 may specifically bind to at least one epitope on CD137L. For example, VH1 may specifically bind to at least one epitope on CD160. For example, VH1 may specifically bind to at least one epitope on CD272. For example, VH1 may specifically bind to at least one epitope on CEACAM5. For example, VH1 may specifically bind to at least one epitope on CLEC9. For example, VH1 may specifically bind to at least one epitope on CLEC91. For example, VH1 may specifically bind to at least one epitope on CRTH2. For example, VH1 may specifically bind to at least one epitope on CSF-1. For example, VH1 may specifically bind to at least one epitope on CSF-2. For example, VH1 may specifically bind to at least one epitope on CSF-3. For example, VH1 may specifically bind to at least one epitope on CXCL1. For example, VH1 may specifically bind to at least one epitope on CXCL2. For example, VH1 may specifically bind to at least one epitope on CXCL4. For example, VH1 may specifically bind to at least one epitope on CXCL12. For example, VH1 may specifically bind to at least one epitope on CXCL13. For example, VH1 may specifically bind to at least one epitope on CXCR3. For example, VH1 may specifically bind to at least one epitope on cMet. For example, VH1 may specifically bind to at least one epitope on CTLA4. For example, VH1 may specifically bind to at least one epitope on DLL3. For example, VH1 may specifically bind to at least one epitope on DNGR-1. For example, VH1 may specifically bind to at least one epitope on E-cadherin. For example, VH1 may specifically bind to at least one epitope on EGFR. For example, VH1 may specifically bind to at least one epitope on ENTPD1. For example, VH1 may specifically bind to at least one epitope on EpCAM. For example, VH1 may specifically bind to at least one epitope on FCER1. For example, VH1 may specifically bind to at least one epitope on FCER1A. For example, VH1 may specifically bind to at least one epitope on FCER2. For example, VH1 may specifically bind to at least one epitope on FGFR. For example, VH1 may specifically bind to at least one epitope on FLAP. For example, VH1 may specifically bind to at least one epitope on FOLH1. For example, VH1 may specifically bind to at least one epitope on Gi24. For example, VH1 may specifically bind to at least one epitope on GITR. For example, VH1 may specifically bind to at least one epitope on GITRL. For example, VH1 may specifically bind to at least one epitope on GPR5. For example, VH1 may specifically bind to at least one epitope on HER2. For example, VH1 may specifically bind to at least one epitope on HER3. For example, VH1 may specifically bind to at least one epitope on ICOSL. For example, VH1 may specifically bind to at least one epitope on ICOS. For example, VH1 may specifically bind to at least one epitope on HHLA2. For example, VH1 may specifically bind to at least one epitope on HMGB1. For example, VH1 may specifically bind to at least one epitope on HVEM. For example, VH1 may specifically bind to at least one epitope on IDO. For example, VH1 may specifically bind to at least one epitope on IFNa. For example, VH1 may specifically bind to at least one epitope on IgE. For example, VH1 may specifically bind to at least one epitope on IGF1R. For example, VH1 may specifically bind to at least one epitope on IL2Rbeta. For example, VH1 may specifically bind to at least one epitope on ILL For example, VH1 may specifically bind to at least one epitope on ILIA. For example, VH1 may specifically bind to at least one epitope on IL1B. For example, VH1 may specifically bind to at least one epitope on IL1F10. For example, VH1 may specifically bind to at least one epitope on IL2. For example, VH1 may specifically bind to at least one epitope on IL4. For example, VH1 may specifically bind to at least one epitope on IL4Ra. For example, VH1 may specifically bind to at least one epitope on IL5. For example, VH1 may specifically bind to at least one epitope on IL5R. For example, VH1 may specifically bind to at least one epitope on IL6. For example, VH1 may specifically bind to at least one epitope on IL7. For example, VH1 may specifically bind to at least one epitope on IL7Ra. For example, VH1 may specifically bind to at least one epitope on IL8. For example, VH1 may specifically bind to at least one epitope on IL9. For example, VH1 may specifically bind to at least one epitope on IL9R. For example, VH1 may specifically bind to at least one epitope on IL10. For example, VH1 may specifically bind to at least one epitope on rhIL10. For example, VH1 may specifically bind to at least one epitope on IL12. For example, VH1 may specifically bind to at least one epitope on IL13. For example, VH1 may specifically bind to at least one epitope on IL13Ra1. For example, VH1 may specifically bind to at least one epitope on IL13Ra2. For example, VH1 may specifically bind to at least one epitope on IL15. For example, VH1 may specifically bind to at least one epitope on IL17. For example, VH1 may specifically bind to at least one epitope on IL17Rb. For example, VH1 may specifically bind to at least one epitope on IL18. For example, VH1 may specifically bind to at least one epitope on IL22. For example, VH1 may specifically bind to at least one epitope on IL23. For example, VH1 may specifically bind to at least one epitope on IL25. For example, VH1 may specifically bind to at least one epitope on IL7. For example, VH1 may specifically bind to at least one epitope on IL33. For example, VH1 may specifically bind to at least one epitope on IL35. For example, VH1 may specifically bind to at least one epitope on ITGB4. For example, VH1 may specifically bind to at least one epitope on ITK. For example, VH1 may specifically bind to at least one epitope on KIR. For example, VH1 may specifically bind to at least one epitope on LAG3. For example, VH1 may specifically bind to at least one epitope on LAMP1. For example, VH1 may specifically bind to at least one epitope on leptin. For example, VH1 may specifically bind to at least one epitope on LPFS2. For example, VH1 may specifically bind to at least one epitope on MHC class II. For example, VH1 may specifically bind to at least one epitope on MUC-1. For example, VH1 may specifically bind to at least one epitope on MUC-16. For example, VH1 may specifically bind to at least one epitope on NCR3LG1. For example, VH1 may specifically bind to at least one epitope on NKG2D. For example, VH1 may specifically bind to at least one epitope on NKp46. For example, VH1 may specifically bind to at least one epitope on NTPDase-1. For example, VH1 may specifically bind to at least one epitope on OX40. For example, VH1 may specifically bind to at least one epitope on OX40L. For example, VH1 may specifically bind to at least one epitope on PD-1. For example, VH1 may specifically bind to at least one epitope on PD-L1. For example, VH1 may specifically bind to at least one epitope on PD-L2. For example, VH1 may specifically bind to at least one epitope on PROM1. For example, VH1 may specifically bind to at least one epitope on S152. For example, VH1 may specifically bind to at least one epitope on SIRPalpha. For example, VH1 may specifically bind to at least one epitope on SISP1. For example, VH1 may specifically bind to at least one epitope on SLC. For example, VH1 may specifically bind to at least one epitope on SPG64. For example, VH1 may specifically bind to at least one epitope on ST2. For example, VH1 may specifically bind to at least one epitope on STEAP1. For example, VH1 may specifically bind to at least one epitope on STEAP2. For example, VH1 may specifically bind to at least one epitope on Syk kinase. For example, VH1 may specifically bind to at least one epitope on STEAP1. For example, VH1 may specifically bind to at least one epitope on TROP2. For example, VH1 may specifically bind to at least one epitope on TACI. For example, VH1 may specifically bind to at least one epitope on TDO. For example, VH1 may specifically bind to at least one epitope on T14. For example, VH1 may specifically bind to at least one epitope on TIGIT. For example, VH1 may specifically bind to at least one epitope on TIM3. For example, VH1 may specifically bind to at least one epitope on TLR. For example, VH1 may specifically bind to at least one epitope on TLR2. For example, VH1 may specifically bind to at least one epitope on TLR4. For example, VH1 may specifically bind to at least one epitope on TLR5. For example, VH1 may specifically bind to at least one epitope on TLR9. For example, VH1 may specifically bind to at least one epitope on TMEF1. For example, VH1 may specifically bind to at least one epitope on TNFa. For example, VH1 may specifically bind to at least one epitope on TNFRSF7. For example, VH1 may specifically bind to at least one epitope on Tp55. For example, VH1 may specifically bind to at least one epitope on TREM1. For example, VH1 may specifically bind to at least one epitope on TSLP. For example, VH1 may specifically bind to at least one epitope on TSLPR. For example, VH1 may specifically bind to at least one epitope on TWEAK. For example, VH1 may specifically bind to at least one epitope on VEGF. For example, VH1 may specifically bind to at least one epitope on VISTA. For example, VH1 may specifically bind to at least one epitope on Vstm3. For example, VH1 may specifically bind to at least one epitope on WUCAM. For example, VH1 may specifically bind to at least one epitope on CD16A. For example, VH1 may specifically bind to at least one epitope on CD30. For example, VH1 may specifically bind to at least one epitope on DLL4. For example, VH1 may specifically bind to at least one epitope on GP100. For example, VH1 may specifically bind to at least one epitope on GPRC5D. For example, VH1 may specifically bind to at least one epitope on TGFbeta.

[0258] In some aspects of an antigen binding polypeptide or antigen binding polypeptide complex of the invention, VH2 is a second immunoglobulin heavy chain variable region that specifically binds to at least one epitope on at least one antigen selected from the group consisting of A2AR, APRIL, ATPDase, BAFF, BAFFR, BCMA, BlyS, BTK, BTLA, B7DC, B7H1, B7H2, B7H3, B7H4, B7H5, B7H6, B7H7, B7RP1, B7-4, C3, C5, CCL2, CCL3, CCL4, CCL5, CCL7, CCL8, CCL11, CCL15, CCL17, CCL19, CCL20, CCL21, CCL25 CCR3, CCR4, CD3, CD16A, CD19, CD20, CD24, CD27, CD28, CD30, CD38, CD39, CD40, CD40L, CD47, CD52, CD70, CD80, CD86, CD123, CD133, CD137, CD137L, CD160, CD272, CEACAM5, CLEC9, CLEC91, CRTH2, CSF-1, CSF-2, CSF-3, CXCL1, CXCL2, CXCL4, CXCL12, CXCL13, CXCR3, cMet, CTLA4, DLL3, DLL4, DNGR-1, E-cadherin, EGFR, ENTPD1, EpCAM, FCER1, FCER1A, FCER2, FGFR, FLAP, FOLH1, Gi24, GITR, GITRL, GPR5, GP100, GPRC5D, HER2, HER3, ICOSL, ICOS, HHLA2, HMGB1, HVEM, IDO, IFNa, IgE, IGF1R, IL2Rbeta, IL1, ILIA, IL1B, IL1F10, IL2, IL4, IL4Ra, IL5, IL5R, IL6, IL7, IL7Ra, IL8, IL9, IL9R, IL10, rhIL1O, IL12, IL13, IL13Ra1, IL13Ra2, IL15, IL17, IL17Rb, IL18, IL22, IL23, IL25, IL7, IL33, IL35, ITGB4, ITK, KIR, LAG3, LAMP1, leptin, LPFS2, MHC class II, MUC-1, MUC-16, NCR3LG1, NKG2D, NKp46, NTPDase-1, OX40, OX40L, PD-1, PD-L1, PD-L2, PROM1, S152, SIRPalpha, SISP1, SLC, SPG64, ST2, STEAP1, STEAP2, Syk kinase, STEAP1, TROP2, TACI, TDO, TGFBETA, T14, TIGIT, TIM3, TLR, TLR2, TLR4, TLR5, TLR9, TMEF1, TNFa, TNFRSF7, Tp55, TREM1, TSLP, TSLPR, TWEAK, VEGF, VISTA, Vstm3, and WUCAM. For example, VH2 may specifically bind to at least one epitope on A2AR. For example, VH2 may specifically bind to at least one epitope on APRIL. For example, VH2 may specifically bind to at least one epitope on ATPDase. For example, VH2 may specifically bind to at least one epitope on BAFF. For example, VH2 may specifically bind to at least one epitope on BAFFR. For example, VH2 may specifically bind to at least one epitope on BCMA. For example, VH2 may specifically bind to at least one epitope on BlyS. For example, VH2 may specifically bind to at least one epitope on BTK. For example, VH2 may specifically bind to at least one epitope on BTLA. For example, VH2 may specifically bind to at least one epitope on B7DC. For example, VH2 may specifically bind to at least one epitope on B7H1. For example, VH2 may specifically bind to at least one epitope on B7H2. For example, VH2 may specifically bind to at least one epitope on B7H3. For example, VH2 may specifically bind to at least one epitope on B7H4. For example, VH2 may specifically bind to at least one epitope on B7H5. For example, VH2 may specifically bind to at least one epitope on B7H6. For example, VH2 may specifically bind to at least one epitope on B7H7. For example, VH2 may specifically bind to at least one epitope on B7RP1. For example, VH2 may specifically bind to at least one epitope on B7-4. For example, VH2 may specifically bind to at least one epitope on C3. For example, VH2 may specifically bind to at least one epitope on C5. For example, VH2 may specifically bind to at least one epitope on CCL2. For example, VH2 may specifically bind to at least one epitope on CCL3. For example, VH2 may specifically bind to at least one epitope on CCL4. For example, VH2 may specifically bind to at least one epitope on CCL5. For example, VH2 may specifically bind to at least one epitope on CCL7. For example, VH2 may specifically bind to at least one epitope on CCL8. For example, VH2 may specifically bind to at least one epitope on CCL11. For example, VH2 may specifically bind to at least one epitope on CCL15. For example, VH2 may specifically bind to at least one epitope on CCL17. For example, VH2 may specifically bind to at least one epitope on CCL19. For example, VH2 may specifically bind to at least one epitope on CCL20. For example, VH2 may specifically bind to at least one epitope on CCL21. For example, VH2 may specifically bind to at least one epitope on CCL25. For example, VH2 may specifically bind to at least one epitope on CCR3. For example, VH2 may specifically bind to at least one epitope on CCR4. For example, VH2 may specifically bind to at least one epitope on CD3. For example, VH2 may specifically bind to at least one epitope on CD19. For example, VH2 may specifically bind to at least one epitope on CD20. For example, VH2 may specifically bind to at least one epitope on CD24. For example, VH2 may specifically bind to at least one epitope on CD27. For example, VH2 may specifically bind to at least one epitope on CD28. For example, VH2 may specifically bind to at least one epitope on CD38. For example, VH2 may specifically bind to at least one epitope on CD39. For example, VH2 may specifically bind to at least one epitope on CD40. For example, VH2 may specifically bind to at least one epitope on CD40L. For example, VH2 may specifically bind to at least one epitope on CD47. For example, VH2 may specifically bind to at least one epitope on CD52. For example, VH2 may specifically bind to at least one epitope on CD70. For example, VH2 may specifically bind to at least one epitope on CD80. For example, VH2 may specifically bind to at least one epitope on CD86. For example, VH2 may specifically bind to at least one epitope on CD123. For example, VH2 may specifically bind to at least one epitope on CD133. For example, VH2 may specifically bind to at least one epitope on CD137. For example, VH2 may specifically bind to at least one epitope on CD137L. For example, VH2 may specifically bind to at least one epitope on CD160. For example, VH2 may specifically bind to at least one epitope on CD272. For example, VH2 may specifically bind to at least one epitope on CEACAM5. For example, VH2 may specifically bind to at least one epitope on CLEC9. For example, VH2 may specifically bind to at least one epitope on CLEC91. For example, VH2 may specifically bind to at least one epitope on CRTH2. For example, VH2 may specifically bind to at least one epitope on CSF-1. For example, VH2 may specifically bind to at least one epitope on CSF-2. For example, VH2 may specifically bind to at least one epitope on CSF-3. For example, VH2 may specifically bind to at least one epitope on CXCL1. For example, VH2 may specifically bind to at least one epitope on CXCL2. For example, VH2 may specifically bind to at least one epitope on CXCL4. For example, VH2 may specifically bind to at least one epitope on CXCL12. For example, VH2 may specifically bind to at least one epitope on CXCL13. For example, VH2 may specifically bind to at least one epitope on CXCR3. For example, VH2 may specifically bind to at least one epitope on cMet. For example, VH2 may specifically bind to at least one epitope on CTLA4. For example, VH2 may specifically bind to at least one epitope on DLL3. For example, VH2 may specifically bind to at least one epitope on DNGR-1. For example, VH2 may specifically bind to at least one epitope on E-cadherin. For example, VH2 may specifically bind to at least one epitope on EGFR. For example, VH2 may specifically bind to at least one epitope on ENTPD1. For example, VH2 may specifically bind to at least one epitope on EpCAM. For example, VH2 may specifically bind to at least one epitope on FCER1. For example, VH2 may specifically bind to at least one epitope on FCER1A. For example, VH2 may specifically bind to at least one epitope on FCER2. For example, VH2 may specifically bind to at least one epitope on FGFR. For example, VH2 may specifically bind to at least one epitope on FLAP. For example, VH2 may specifically bind to at least one epitope on FOLH1. For example, VH2 may specifically bind to at least one epitope on Gi24. For example, VH2 may specifically bind to at least one epitope on GITR. For example, VH2 may specifically bind to at least one epitope on GITRL. For example, VH2 may specifically bind to at least one epitope on GPR5. For example, VH2 may specifically bind to at least one epitope on HER2. For example, VH2 may specifically bind to at least one epitope on HER3. For example, VH2 may specifically bind to at least one epitope on ICOSL. For example, VH2 may specifically bind to at least one epitope on ICOS. For example, VH2 may specifically bind to at least one epitope on HHLA2. For example, VH2 may specifically bind to at least one epitope on HMGB1. For example, VH2 may specifically bind to at least one epitope on HVEM. For example, VH2 may specifically bind to at least one epitope on IDO. For example, VH2 may specifically bind to at least one epitope on IFNa. For example, VH2 may specifically bind to at least one epitope on IgE. For example, VH2 may specifically bind to at least one epitope on IGF1R. For example, VH2 may specifically bind to at least one epitope on IL2Rbeta. For example, VH2 may specifically bind to at least one epitope on ILL For example, VH2 may specifically bind to at least one epitope on ILIA. For example, VH2 may specifically bind to at least one epitope on IL1B. For example, VH2 may specifically bind to at least one epitope on IL1F10. For example, VH2 may specifically bind to at least one epitope on IL2. For example, VH2 may specifically bind to at least one epitope on IL4. For example, VH2 may specifically bind to at least one epitope on IL4Ra. For example, VH2 may specifically bind to at least one epitope on IL5. For example, VH2 may specifically bind to at least one epitope on IL5R. For example, VH2 may specifically bind to at least one epitope on IL6. For example, VH2 may specifically bind to at least one epitope on IL7. For example, VH2 may specifically bind to at least one epitope on IL7Ra. For example, VH2 may specifically bind to at least one epitope on IL8. For example, VH2 may specifically bind to at least one epitope on IL9. For example, VH2 may specifically bind to at least one epitope on IL9R. For example, VH2 may specifically bind to at least one epitope on IL10. For example, VH2 may specifically bind to at least one epitope on rhIL10. For example, VH2 may specifically bind to at least one epitope on IL12. For example, VH2 may specifically bind to at least one epitope on IL13. For example, VH2 may specifically bind to at least one epitope on IL13Ra1. For example, VH2 may specifically bind to at least one epitope on IL13Ra2. For example, VH2 may specifically bind to at least one epitope on IL15. For example, VH2 may specifically bind to at least one epitope on IL17. For example, VH2 may specifically bind to at least one epitope on IL17Rb. For example, VH2 may specifically bind to at least one epitope on IL18. For example, VH2 may specifically bind to at least one epitope on IL22. For example, VH2 may specifically bind to at least one epitope on IL23. For example, VH2 may specifically bind to at least one epitope on IL25. For example, VH2 may specifically bind to at least one epitope on IL7. For example, VH2 may specifically bind to at least one epitope on IL33. For example, VH2 may specifically bind to at least one epitope on IL35. For example, VH2 may specifically bind to at least one epitope on ITGB4. For example, VH2 may specifically bind to at least one epitope on ITK. For example, VH2 may specifically bind to at least one epitope on KIR. For example, VH2 may specifically bind to at least one epitope on LAG3. For example, VH2 may specifically bind to at least one epitope on LAMP1. For example, VH2 may specifically bind to at least one epitope on leptin. For example, VH2 may specifically bind to at least one epitope on LPFS2. For example, VH2 may specifically bind to at least one epitope on MHC class II. For example, VH2 may specifically bind to at least one epitope on MUC-1. For example, VH2 may specifically bind to at least one epitope on MUC-16. For example, VH2 may specifically bind to at least one epitope on NCR3LG1. For example, VH2 may specifically bind to at least one epitope on NKG2D. For example, VH2 may specifically bind to at least one epitope on NKp46. For example, VH2 may specifically bind to at least one epitope on NTPDase-1. For example, VH2 may specifically bind to at least one epitope on OX40. For example, VH2 may specifically bind to at least one epitope on OX40L. For example, VH2 may specifically bind to at least one epitope on PD-1. For example, VH2 may specifically bind to at least one epitope on PD-L1. For example, VH2 may specifically bind to at least one epitope on PD-L2. For example, VH2 may specifically bind to at least one epitope on PROM1. For example, VH2 may specifically bind to at least one epitope on S152. For example, VH2 may specifically bind to at least one epitope on SIRPalpha. For example, VH2 may specifically bind to at least one epitope on SISP1. For example, VH2 may specifically bind to at least one epitope on SLC. For example, VH2 may specifically bind to at least one epitope on SPG64. For example, VH2 may specifically bind to at least one epitope on ST2. For example, VH2 may specifically bind to at least one epitope on STEAP1. For example, VH2 may specifically bind to at least one epitope on STEAP2. For example, VH2 may specifically bind to at least one epitope on Syk kinase. For example, VH2 may specifically bind to at least one epitope on STEAP1. For example, VH2 may specifically bind to at least one epitope on TROP2. For example, VH2 may specifically bind to at least one epitope on TACI. For example, VH2 may specifically bind to at least one epitope on TDO. For example, VH2 may specifically bind to at least one epitope on T14. For example, VH2 may specifically bind to at least one epitope on TIGIT. For example, VH2 may specifically bind to at least one epitope on TIM3. For example, VH2 may specifically bind to at least one epitope on TLR. For example, VH2 may specifically bind to at least one epitope on TLR2. For example, VH2 may specifically bind to at least one epitope on TLR4. For example, VH2 may specifically bind to at least one epitope on TLR5. For example, VH2 may specifically bind to at least one epitope on TLR9. For example, VH2 may specifically bind to at least one epitope on TMEF1. For example, VH2 may specifically bind to at least one epitope on TNFa. For example, VH2 may specifically bind to at least one epitope on TNFRSF7. For example, VH2 may specifically bind to at least one epitope on Tp55. For example, VH2 may specifically bind to at least one epitope on TREM1. For example, VH2 may specifically bind to at least one epitope on TSLP. For example, VH2 may specifically bind to at least one epitope on TSLPR. For example, VH2 may specifically bind to at least one epitope on TWEAK. For example, VH2 may specifically bind to at least one epitope on VEGF. For example, VH2 may specifically bind to at least one epitope on VISTA. For example, VH2 may specifically bind to at least one epitope on Vstm3. For example, VH2 may specifically bind to at least one epitope on WUCAM. For example, VH2 may specifically bind to at least one epitope on CD16A. For example, VH2 may specifically bind to at least one epitope on CD30. For example, VH2 may specifically bind to at least one epitope on DLL4. For example, VH2 may specifically bind to at least one epitope on GP100. For example, VH2 may specifically bind to at least one epitope on GPRC5D. For example, VH2 may specifically bind to at least one epitope on TGFbeta.

[0259] In some aspects of an antigen binding polypeptide or antigen binding polypeptide complex of the invention, VH3 is a third immunoglobulin heavy chain variable region that specifically binds to at least one epitope on at least one antigen selected from the group consisting of A2AR, APRIL, ATPDase, BAFF, BAFFR, BCMA, BlyS, BTK, BTLA, B7DC, B7H1, B7H2, B7H3, B7H4, B7H5, B7H6, B7H7, B7RP1, B7-4, C3, C5, CCL2, CCL3, CCL4, CCL5, CCL7, CCL8, CCL11, CCL15, CCL17, CCL19, CCL20, CCL21, CCL25 CCR3, CCR4, CD3, CD16A, CD19, CD20, CD24, CD27, CD28, CD30, CD38, CD39, CD40, CD40L, CD47, CD52, CD70, CD80, CD86, CD123, CD133, CD137, CD137L, CD160, CD272, CEACAM5, CLEC9, CLEC91, CRTH2, CSF-1, CSF-2, CSF-3, CXCL1, CXCL2, CXCL4, CXCL12, CXCL13, CXCR3, cMet, CTLA4, DLL3, DLL4, DNGR-1, E-cadherin, EGFR, ENTPD1, EpCAM, FCER1, FCER1A, FCER2, FGFR, FLAP, FOLH1, Gi24, GITR, GITRL, GPR5, GP100, GPRC5D, HER2, HER3, ICOSL, ICOS, HHLA2, HMGB1, HVEM, IDO, IFNa, IgE, IGF1R, IL2Rbeta, IL1, ILIA, IL1B, IL1F10, IL2, IL4, IL4Ra, IL5, IL5R, IL6, IL7, IL7Ra, IL8, IL9, IL9R, IL10, rhIL1O, IL12, IL13, IL13Ra1, IL13Ra2, IL15, IL17, IL17Rb, IL18, IL22, IL23, IL25, IL7, IL33, IL35, ITGB4, ITK, KIR, LAG3, LAMP1, leptin, LPFS2, MHC class II, MUC-1, MUC-16, NCR3LG1, NKG2D, NKp46, NTPDase-1, OX40, OX40L, PD-1, PD-L1, PD-L2, PROM1, S152, SIRPalpha, SISP1, SLC, SPG64, ST2, STEAP1, STEAP2, Syk kinase, STEAP1, TROP2, TACI, TDO, TGFBETA, T14, TIGIT, TIM3, TLR, TLR2, TLR4, TLR5, TLR9, TMEF1, TNFa, TNFRSF7, Tp55, TREM1, TSLP, TSLPR, TWEAK, VEGF, VISTA, Vstm3, and WUCAM. For example, VH3 may specifically bind to at least one epitope on A2AR. For example, VH3 may specifically bind to at least one epitope on APRIL. For example, VH3 may specifically bind to at least one epitope on ATPDase. For example, VH3 may specifically bind to at least one epitope on BAFF. For example, VH3 may specifically bind to at least one epitope on BAFFR. For example, VH3 may specifically bind to at least one epitope on BCMA. For example, VH3 may specifically bind to at least one epitope on BlyS. For example, VH3 may specifically bind to at least one epitope on BTK. For example, VH3 may specifically bind to at least one epitope on BTLA. For example, VH3 may specifically bind to at least one epitope on B7DC. For example, VH3 may specifically bind to at least one epitope on B7H1. For example, VH3 may specifically bind to at least one epitope on B7H2. For example, VH3 may specifically bind to at least one epitope on B7H3. For example, VH3 may specifically bind to at least one epitope on B7H4. For example, VH3 may specifically bind to at least one epitope on B7H5. For example, VH3 may specifically bind to at least one epitope on B7H6. For example, VH3 may specifically bind to at least one epitope on B7H7. For example, VH3 may specifically bind to at least one epitope on B7RP1. For example, VH3 may specifically bind to at least one epitope on B7-4. For example, VH3 may specifically bind to at least one epitope on C3. For example, VH3 may specifically bind to at least one epitope on C5. For example, VH3 may specifically bind to at least one epitope on CCL2. For example, VH3 may specifically bind to at least one epitope on CCL3. For example, VH3 may specifically bind to at least one epitope on CCL4. For example, VH3 may specifically bind to at least one epitope on CCL5. For example, VH3 may specifically bind to at least one epitope on CCL7. For example, VH3 may specifically bind to at least one epitope on CCL8. For example, VH3 may specifically bind to at least one epitope on CCL11. For example, VH3 may specifically bind to at least one epitope on CCL15. For example, VH3 may specifically bind to at least one epitope on CCL17. For example, VH3 may specifically bind to at least one epitope on CCL19. For example, VH3 may specifically bind to at least one epitope on CCL20. For example, VH3 may specifically bind to at least one epitope on CCL21. For example, VH3 may specifically bind to at least one epitope on CCL25. For example, VH3 may specifically bind to at least one epitope on CCR3. For example, VH3 may specifically bind to at least one epitope on CCR4. For example, VH3 may specifically bind to at least one epitope on CD3. For example, VH3 may specifically bind to at least one epitope on CD19. For example, VH3 may specifically bind to at least one epitope on CD20. For example, VH3 may specifically bind to at least one epitope on CD24. For example, VH3 may specifically bind to at least one epitope on CD27. For example, VH3 may specifically bind to at least one epitope on CD28. For example, VH3 may specifically bind to at least one epitope on CD38. For example, VH3 may specifically bind to at least one epitope on CD39. For example, VH3 may specifically bind to at least one epitope on CD40. For example, VH3 may specifically bind to at least one epitope on CD40L. For example, VH3 may specifically bind to at least one epitope on CD47. For example, VH3 may specifically bind to at least one epitope on CD52. For example, VH3 may specifically bind to at least one epitope on CD70. For example, VH3 may specifically bind to at least one epitope on CD80. For example, VH3 may specifically bind to at least one epitope on CD86. For example, VH3 may specifically bind to at least one epitope on CD123. For example, VH3 may specifically bind to at least one epitope on CD133. For example, VH3 may specifically bind to at least one epitope on CD137. For example, VH3 may specifically bind to at least one epitope on CD137L. For example, VH3 may specifically bind to at least one epitope on CD160. For example, VH3 may specifically bind to at least one epitope on CD272. For example, VH3 may specifically bind to at least one epitope on CEACAM5. For example, VH3 may specifically bind to at least one epitope on CLEC9. For example, VH3 may specifically bind to at least one epitope on CLEC91. For example, VH3 may specifically bind to at least one epitope on CRTH2. For example, VH3 may specifically bind to at least one epitope on CSF-1. For example, VH3 may specifically bind to at least one epitope on CSF-2. For example, VH3 may specifically bind to at least one epitope on CSF-3. For example, VH3 may specifically bind to at least one epitope on CXCL1. For example, VH3 may specifically bind to at least one epitope on CXCL2. For example, VH3 may specifically bind to at least one epitope on CXCL4. For example, VH3 may specifically bind to at least one epitope on CXCL12. For example, VH3 may specifically bind to at least one epitope on CXCL13. For example, VH3 may specifically bind to at least one epitope on CXCR3. For example, VH3 may specifically bind to at least one epitope on cMet. For example, VH3 may specifically bind to at least one epitope on CTLA4. For example, VH3 may specifically bind to at least one epitope on DLL3. For example, VH3 may specifically bind to at least one epitope on DNGR-1. For example, VH3 may specifically bind to at least one epitope on E-cadherin. For example, VH3 may specifically bind to at least one epitope on EGFR. For example, VH3 may specifically bind to at least one epitope on ENTPD1. For example, VH3 may specifically bind to at least one epitope on EpCAM. For example, VH3 may specifically bind to at least one epitope on FCER1. For example, VH3 may specifically bind to at least one epitope on FCER1A. For example, VH3 may specifically bind to at least one epitope on FCER2. For example, VH3 may specifically bind to at least one epitope on FGFR. For example, VH3 may specifically bind to at least one epitope on FLAP. For example, VH3 may specifically bind to at least one epitope on FOLH1. For example, VH3 may specifically bind to at least one epitope on Gi24. For example, VH3 may specifically bind to at least one epitope on GITR. For example, VH3 may specifically bind to at least one epitope on GITRL. For example, VH3 may specifically bind to at least one epitope on GPR5. For example, VH3 may specifically bind to at least one epitope on HER2. For example, VH3 may specifically bind to at least one epitope on HER3. For example, VH3 may specifically bind to at least one epitope on ICOSL. For example, VH3 may specifically bind to at least one epitope on ICOS. For example, VH3 may specifically bind to at least one epitope on HHLA2. For example, VH3 may specifically bind to at least one epitope on HMGB1. For example, VH3 may specifically bind to at least one epitope on HVEM. For example, VH3 may specifically bind to at least one epitope on IDO. For example, VH3 may specifically bind to at least one epitope on IFNa. For example, VH3 may specifically bind to at least one epitope on IgE. For example, VH3 may specifically bind to at least one epitope on IGF1R. For example, VH3 may specifically bind to at least one epitope on IL2Rbeta. For example, VH3 may specifically bind to at least one epitope on ILL For example, VH3 may specifically bind to at least one epitope on ILIA. For example, VH3 may specifically bind to at least one epitope on IL1B. For example, VH3 may specifically bind to at least one epitope on IL1F10. For example, VH3 may specifically bind to at least one epitope on IL2. For example, VH3 may specifically bind to at least one epitope on IL4. For example, VH3 may specifically bind to at least one epitope on IL4Ra. For example, VH3 may specifically bind to at least one epitope on IL5. For example, VH3 may specifically bind to at least one epitope on IL5R. For example, VH3 may specifically bind to at least one epitope on IL6. For example, VH3 may specifically bind to at least one epitope on IL7. For example, VH3 may specifically bind to at least one epitope on IL7Ra. For example, VH3 may specifically bind to at least one epitope on IL8. For example, VH3 may specifically bind to at least one epitope on IL9. For example, VH3 may specifically bind to at least one epitope on IL9R. For example, VH3 may specifically bind to at least one epitope on IL10. For example, VH3 may specifically bind to at least one epitope on rhIL10. For example, VH3 may specifically bind to at least one epitope on IL12. For example, VH3 may specifically bind to at least one epitope on IL13. For example, VH3 may specifically bind to at least one epitope on IL13Ra1. For example, VH3 may specifically bind to at least one epitope on IL13Ra2. For example, VH3 may specifically bind to at least one epitope on IL15. For example, VH3 may specifically bind to at least one epitope on IL17. For example, VH3 may specifically bind to at least one epitope on IL17Rb. For example, VH3 may specifically bind to at least one epitope on IL18. For example, VH3 may specifically bind to at least one epitope on IL22. For example, VH3 may specifically bind to at least one epitope on IL23. For example, VH3 may specifically bind to at least one epitope on IL25. For example, VH3 may specifically bind to at least one epitope on IL7. For example, VH3 may specifically bind to at least one epitope on IL33. For example, VH3 may specifically bind to at least one epitope on IL35. For example, VH3 may specifically bind to at least one epitope on ITGB4. For example, VH3 may specifically bind to at least one epitope on ITK. For example, VH3 may specifically bind to at least one epitope on KIR. For example, VH3 may specifically bind to at least one epitope on LAG3. For example, VH3 may specifically bind to at least one epitope on LAMP1. For example, VH3 may specifically bind to at least one epitope on leptin. For example, VH3 may specifically bind to at least one epitope on LPFS2. For example, VH3 may specifically bind to at least one epitope on MHC class II. For example, VH3 may specifically bind to at least one epitope on MUC-1. For example, VH3 may specifically bind to at least one epitope on MUC-16. For example, VH3 may specifically bind to at least one epitope on NCR3LG1. For example, VH3 may specifically bind to at least one epitope on NKG2D. For example, VH3 may specifically bind to at least one epitope on NKp46. For example, VH3 may specifically bind to at least one epitope on NTPDase-1. For example, VH3 may specifically bind to at least one epitope on OX40. For example, VH3 may specifically bind to at least one epitope on OX40L. For example, VH3 may specifically bind to at least one epitope on PD-1. For example, VH3 may specifically bind to at least one epitope on PD-L1. For example, VH3 may specifically bind to at least one epitope on PD-L2. For example, VH3 may specifically bind to at least one epitope on PROM1. For example, VH3 may specifically bind to at least one epitope on S152. For example, VH3 may specifically bind to at least one epitope on SIRPalpha. For example, VH3 may specifically bind to at least one epitope on SISP1. For example, VH3 may specifically bind to at least one epitope on SLC. For example, VH3 may specifically bind to at least one epitope on SPG64. For example, VH3 may specifically bind to at least one epitope on ST2. For example, VH3 may specifically bind to at least one epitope on STEAP1. For example, VH3 may specifically bind to at least one epitope on STEAP2. For example, VH3 may specifically bind to at least one epitope on Syk kinase. For example, VH3 may specifically bind to at least one epitope on STEAP1. For example, VH3 may specifically bind to at least one epitope on TROP2. For example, VH3 may specifically bind to at least one epitope on TACI. For example, VH3 may specifically bind to at least one epitope on TDO. For example, VH3 may specifically bind to at least one epitope on T14. For example, VH3 may specifically bind to at least one epitope on TIGIT. For example, VH3 may specifically bind to at least one epitope on TIM3. For example, VH3 may specifically bind to at least one epitope on TLR. For example, VH3 may specifically bind to at least one epitope on TLR2. For example, VH3 may specifically bind to at least one epitope on TLR4. For example, VH3 may specifically bind to at least one epitope on TLR5. For example, VH3 may specifically bind to at least one epitope on TLR9. For example, VH3 may specifically bind to at least one epitope on TMEF1. For example, VH3 may specifically bind to at least one epitope on TNFa. For example, VH3 may specifically bind to at least one epitope on TNFRSF7. For example, VH3 may specifically bind to at least one epitope on Tp55. For example, VH3 may specifically bind to at least one epitope on TREM1. For example, VH3 may specifically bind to at least one epitope on TSLP. For example, VH3 may specifically bind to at least one epitope on TSLPR. For example, VH3 may specifically bind to at least one epitope on TWEAK. For example, VH3 may specifically bind to at least one epitope on VEGF. For example, VH3 may specifically bind to at least one epitope on VISTA. For example, VH3 may specifically bind to at least one epitope on Vstm3. For example, VH3 may specifically bind to at least one epitope on WUCAM. For example, VH3 may specifically bind to at least one epitope on CD16A. For example, VH3 may specifically bind to at least one epitope on CD30. For example, VH3 may specifically bind to at least one epitope on DLL4. For example, VH3 may specifically bind to at least one epitope on GP100. For example, VH3 may specifically bind to at least one epitope on GPRC5D. For example, VH3 may specifically bind to at least one epitope on TGFbeta.

[0260] In some aspects of an antigen binding polypeptide or antigen binding polypeptide complex of the invention, VH4 is a fourth immunoglobulin heavy chain variable region that specifically binds to at least one epitope on at least one antigen selected from the group consisting of A2AR, APRIL, ATPDase, BAFF, BAFFR, BCMA, BlyS, BTK, BTLA, B7DC, B7H1, B7H2, B7H3, B7H4, B7H5, B7H6, B7H7, B7RP1, B7-4, C3, C5, CCL2, CCL3, CCL4, CCL5, CCL7, CCL8, CCL11, CCL15, CCL17, CCL19, CCL20, CCL21, CCL25 CCR3, CCR4, CD3, CD16A, CD19, CD20, CD24, CD27, CD28, CD30, CD38, CD39, CD40, CD40L, CD47, CD52, CD70, CD80, CD86, CD123, CD133, CD137, CD137L, CD160, CD272, CEACAM5, CLEC9, CLEC91, CRTH2, CSF-1, CSF-2, CSF-3, CXCL1, CXCL2, CXCL4, CXCL12, CXCL13, CXCR3, cMet, CTLA4, DLL3, DLL4, DNGR-1, E-cadherin, EGFR, ENTPD1, EpCAM, FCER1, FCER1A, FCER2, FGFR, FLAP, FOLH1, Gi24, GITR, GITRL, GPR5, GP100, GPRC5D, HER2, HER3, ICOSL, ICOS, HHLA2, HMGB1, HVEM, IDO, IFNa, IgE, IGF1R, IL2Rbeta, IL1, ILIA, IL1B, IL1F10, IL2, IL4, IL4Ra, IL5, IL5R, IL6, IL7, IL7Ra, IL8, IL9, IL9R, IL10, rhIL1O, IL12, IL13, IL13Ra1, IL13Ra2, IL15, IL17, IL17Rb, IL18, IL22, IL23, IL25, IL7, IL33, IL35, ITGB4, ITK, KIR, LAG3, LAMP1, leptin, LPFS2, MHC class II, MUC-1, MUC-16, NCR3LG1, NKG2D, NKp46, NTPDase-1, OX40, OX40L, PD-1, PD-L1, PD-L2, PROM1, S152, SIRPalpha, SISP1, SLC, SPG64, ST2, STEAP1, STEAP2, Syk kinase, STEAP1, TROP2, TACI, TDO, TGFBETA, T14, TIGIT, TIM3, TLR, TLR2, TLR4, TLR5, TLR9, TMEF1, TNFa, TNFRSF7, Tp55, TREM1, TSLP, TSLPR, TWEAK, VEGF, VISTA, Vstm3, and WUCAM. For example, VH4 may specifically bind to at least one epitope on A2AR. For example, VH4 may specifically bind to at least one epitope on APRIL. For example, VH4 may specifically bind to at least one epitope on ATPDase. For example, VH4 may specifically bind to at least one epitope on BAFF. For example, VH4 may specifically bind to at least one epitope on BAFFR. For example, VH4 may specifically bind to at least one epitope on BCMA. For example, VH4 may specifically bind to at least one epitope on BlyS. For example, VH4 may specifically bind to at least one epitope on BTK. For example, VH4 may specifically bind to at least one epitope on BTLA. For example, VH4 may specifically bind to at least one epitope on B7DC. For example, VH4 may specifically bind to at least one epitope on B7H1. For example, VH4 may specifically bind to at least one epitope on B7H2. For example, VH4 may specifically bind to at least one epitope on B7H3. For example, VH4 may specifically bind to at least one epitope on B7H4. For example, VH4 may specifically bind to at least one epitope on B7H5. For example, VH4 may specifically bind to at least one epitope on B7H6. For example, VH4 may specifically bind to at least one epitope on B7H7. For example, VH4 may specifically bind to at least one epitope on B7RP1. For example, VH4 may specifically bind to at least one epitope on B7-4. For example, VH4 may specifically bind to at least one epitope on C3. For example, VH4 may specifically bind to at least one epitope on C5. For example, VH4 may specifically bind to at least one epitope on CCL2. For example, VH4 may specifically bind to at least one epitope on CCL3. For example, VH4 may specifically bind to at least one epitope on CCL4. For example, VH4 may specifically bind to at least one epitope on CCL5. For example, VH4 may specifically bind to at least one epitope on CCL7. For example, VH4 may specifically bind to at least one epitope on CCL8. For example, VH4 may specifically bind to at least one epitope on CCL11. For example, VH4 may specifically bind to at least one epitope on CCL15. For example, VH4 may specifically bind to at least one epitope on CCL17. For example, VH4 may specifically bind to at least one epitope on CCL19. For example, VH4 may specifically bind to at least one epitope on CCL20. For example, VH4 may specifically bind to at least one epitope on CCL21. For example, VH4 may specifically bind to at least one epitope on CCL25. For example, VH4 may specifically bind to at least one epitope on CCR3. For example, VH4 may specifically bind to at least one epitope on CCR4. For example, VH4 may specifically bind to at least one epitope on CD3. For example, VH4 may specifically bind to at least one epitope on CD19. For example, VH4 may specifically bind to at least one epitope on CD20. For example, VH4 may specifically bind to at least one epitope on CD24. For example, VH4 may specifically bind to at least one epitope on CD27. For example, VH4 may specifically bind to at least one epitope on CD28. For example, VH4 may specifically bind to at least one epitope on CD38. For example, VH4 may specifically bind to at least one epitope on CD39. For example, VH4 may specifically bind to at least one epitope on CD40. For example, VH4 may specifically bind to at least one epitope on CD40L. For example, VH4 may specifically bind to at least one epitope on CD47. For example, VH4 may specifically bind to at least one epitope on CD52. For example, VH4 may specifically bind to at least one epitope on CD70. For example, VH4 may specifically bind to at least one epitope on CD80. For example, VH4 may specifically bind to at least one epitope on CD86. For example, VH4 may specifically bind to at least one epitope on CD123. For example, VH4 may specifically bind to at least one epitope on CD133. For example, VH4 may specifically bind to at least one epitope on CD137. For example, VH4 may specifically bind to at least one epitope on CD137L. For example, VH4 may specifically bind to at least one epitope on CD160. For example, VH4 may specifically bind to at least one epitope on CD272. For example, VH4 may specifically bind to at least one epitope on CEACAM5. For example, VH4 may specifically bind to at least one epitope on CLEC9. For example, VH4 may specifically bind to at least one epitope on CLEC91. For example, VH4 may specifically bind to at least one epitope on CRTH2. For example, VH4 may specifically bind to at least one epitope on CSF-1. For example, VH4 may specifically bind to at least one epitope on CSF-2. For example, VH4 may specifically bind to at least one epitope on CSF-3. For example, VH4 may specifically bind to at least one epitope on CXCL1. For example, VH4 may specifically bind to at least one epitope on CXCL2. For example, VH4 may specifically bind to at least one epitope on CXCL4. For example, VH4 may specifically bind to at least one epitope on CXCL12. For example, VH4 may specifically bind to at least one epitope on CXCL13. For example, VH4 may specifically bind to at least one epitope on CXCR3. For example, VH4 may specifically bind to at least one epitope on cMet. For example, VH4 may specifically bind to at least one epitope on CTLA4. For example, VH4 may specifically bind to at least one epitope on DLL3. For example, VH4 may specifically bind to at least one epitope on DNGR-1. For example, VH4 may specifically bind to at least one epitope on E-cadherin. For example, VH4 may specifically bind to at least one epitope on EGFR. For example, VH4 may specifically bind to at least one epitope on ENTPD1. For example, VH4 may specifically bind to at least one epitope on EpCAM. For example, VH4 may specifically bind to at least one epitope on FCER1. For example, VH4 may specifically bind to at least one epitope on FCER1A. For example, VH4 may specifically bind to at least one epitope on FCER2. For example, VH4 may specifically bind to at least one epitope on FGFR. For example, VH4 may specifically bind to at least one epitope on FLAP. For example, VH4 may specifically bind to at least one epitope on FOLH1. For example, VH4 may specifically bind to at least one epitope on Gi24. For example, VH4 may specifically bind to at least one epitope on GITR. For example, VH4 may specifically bind to at least one epitope on GITRL. For example, VH4 may specifically bind to at least one epitope on GPR5. For example, VH4 may specifically bind to at least one epitope on HER2. For example, VH4 may specifically bind to at least one epitope on HER3. For example, VH4 may specifically bind to at least one epitope on ICOSL. For example, VH4 may specifically bind to at least one epitope on ICOS. For example, VH4 may specifically bind to at least one epitope on HHLA2. For example, VH4 may specifically bind to at least one epitope on HMGB1. For example, VH4 may specifically bind to at least one epitope on HVEM. For example, VH4 may specifically bind to at least one epitope on IDO. For example, VH4 may specifically bind to at least one epitope on IFNa. For example, VH4 may specifically bind to at least one epitope on IgE. For example, VH4 may specifically bind to at least one epitope on IGF1R. For example, VH4 may specifically bind to at least one epitope on IL2Rbeta. For example, VH4 may specifically bind to at least one epitope on ILL For example, VH4 may specifically bind to at least one epitope on ILIA. For example, VH4 may specifically bind to at least one epitope on IL1B. For example, VH4 may specifically bind to at least one epitope on IL1F10. For example, VH4 may specifically bind to at least one epitope on IL2. For example, VH4 may specifically bind to at least one epitope on IL4. For example, VH4 may specifically bind to at least one epitope on IL4Ra. For example, VH4 may specifically bind to at least one epitope on IL5. For example, VH4 may specifically bind to at least one epitope on IL5R. For example, VH4 may specifically bind to at least one epitope on IL6. For example, VH4 may specifically bind to at least one epitope on IL7. For example, VH4 may specifically bind to at least one epitope on IL7Ra. For example, VH4 may specifically bind to at least one epitope on IL8. For example, VH4 may specifically bind to at least one epitope on IL9. For example, VH4 may specifically bind to at least one epitope on IL9R. For example, VH4 may specifically bind to at least one epitope on IL10. For example, VH4 may specifically bind to at least one epitope on rhIL10. For example, VH4 may specifically bind to at least one epitope on IL12. For example, VH4 may specifically bind to at least one epitope on IL13. For example, VH4 may specifically bind to at least one epitope on IL13Ra1. For example, VH4 may specifically bind to at least one epitope on IL13Ra2. For example, VH4 may specifically bind to at least one epitope on IL15. For example, VH4 may specifically bind to at least one epitope on IL17. For example, VH4 may specifically bind to at least one epitope on IL17Rb. For example, VH4 may specifically bind to at least one epitope on IL18. For example, VH4 may specifically bind to at least one epitope on IL22. For example, VH4 may specifically bind to at least one epitope on IL23. For example, VH4 may specifically bind to at least one epitope on IL25. For example, VH4 may specifically bind to at least one epitope on IL7. For example, VH4 may specifically bind to at least one epitope on IL33. For example, VH4 may specifically bind to at least one epitope on IL35. For example, VH4 may specifically bind to at least one epitope on ITGB4. For example, VH4 may specifically bind to at least one epitope on ITK. For example, VH4 may specifically bind to at least one epitope on KIR. For example, VH4 may specifically bind to at least one epitope on LAG3. For example, VH4 may specifically bind to at least one epitope on LAMP1. For example, VH4 may specifically bind to at least one epitope on leptin. For example, VH4 may specifically bind to at least one epitope on LPFS2. For example, VH4 may specifically bind to at least one epitope on MHC class II. For example, VH4 may specifically bind to at least one epitope on MUC-1. For example, VH4 may specifically bind to at least one epitope on MUC-16. For example, VH4 may specifically bind to at least one epitope on NCR3LG1. For example, VH4 may specifically bind to at least one epitope on NKG2D. For example, VH4 may specifically bind to at least one epitope on NKp46. For example, VH4 may specifically bind to at least one epitope on NTPDase-1. For example, VH4 may specifically bind to at least one epitope on OX40. For example, VH4 may specifically bind to at least one epitope on OX40L. For example, VH4 may specifically bind to at least one epitope on PD-1. For example, VH4 may specifically bind to at least one epitope on PD-L1. For example, VH4 may specifically bind to at least one epitope on PD-L2. For example, VH4 may specifically bind to at least one epitope on PROM1. For example, VH4 may specifically bind to at least one epitope on S152. For example, VH4 may specifically bind to at least one epitope on SIRPalpha. For example, VH4 may specifically bind to at least one epitope on SISP1. For example, VH4 may specifically bind to at least one epitope on SLC. For example, VH4 may specifically bind to at least one epitope on SPG64. For example, VH4 may specifically bind to at least one epitope on ST2. For example, VH4 may specifically bind to at least one epitope on STEAP1. For example, VH4 may specifically bind to at least one epitope on STEAP2. For example, VH4 may specifically bind to at least one epitope on Syk kinase. For example, VH4 may specifically bind to at least one epitope on STEAP1. For example, VH4 may specifically bind to at least one epitope on TROP2. For example, VH4 may specifically bind to at least one epitope on TACI. For example, VH4 may specifically bind to at least one epitope on TDO. For example, VH4 may specifically bind to at least one epitope on T14. For example, VH4 may specifically bind to at least one epitope on TIGIT. For example, VH4 may specifically bind to at least one epitope on TIM3. For example, VH4 may specifically bind to at least one epitope on TLR. For example, VH4 may specifically bind to at least one epitope on TLR2. For example, VH4 may specifically bind to at least one epitope on TLR4. For example, VH4 may specifically bind to at least one epitope on TLR5. For example, VH4 may specifically bind to at least one epitope on TLR9. For example, VH4 may specifically bind to at least one epitope on TMEF1. For example, VH4 may specifically bind to at least one epitope on TNFa. For example, VH4 may specifically bind to at least one epitope on TNFRSF7. For example, VH4 may specifically bind to at least one epitope on Tp55. For example, VH4 may specifically bind to at least one epitope on TREM1. For example, VH4 may specifically bind to at least one epitope on TSLP. For example, VH4 may specifically bind to at least one epitope on TSLPR. For example, VH4 may specifically bind to at least one epitope on TWEAK. For example, VH4 may specifically bind to at least one epitope on VEGF. For example, VH4 may specifically bind to at least one epitope on VISTA. For example, VH4 may specifically bind to at least one epitope on Vstm3. For example, VH4 may specifically bind to at least one epitope on WUCAM. For example, VH4 may specifically bind to at least one epitope on CD16A. For example, VH4 may specifically bind to at least one epitope on CD30. For example, VH4 may specifically bind to at least one epitope on DLL4. For example, VH4 may specifically bind to at least one epitope on GP100. For example, VH4 may specifically bind to at least one epitope on GPRC5D. For example, VH4 may specifically bind to at least one epitope on TGFbeta.

[0261] In other aspects of an antigen binding polypeptide or antigen binding polypeptide complex of the invention, VL1 is a first immunoglobulin light chain variable region that specifically binds to at least one epitope on at least one antigen selected from the group consisting of human A2AR, APRIL, ATPDase, BAFF, BAFFR, BCMA, BlyS, BTK, BTLA, B7DC, B7H1, B7H2, B7H3, B7H4, B7H5, B7H6, B7H7, B7RP1, B7-4, C3, C5, CCL2, CCL3, CCL4, CCL5, CCL7, CCL8, CCL11, CCL15, CCL17, CCL19, CCL20, CCL21, CCL25 CCR3, CCR4, CD3, CD16A, CD19, CD20, CD24, CD27, CD28, CD30, CD38, CD39, CD40, CD40L, CD47, CD52, CD70, CD80, CD86, CD123, CD133, CD137, CD137L, CD160, CD272, CEACAM5, CLEC9, CLEC91, CRTH2, CSF-1, CSF-2, CSF-3, CXCL1, CXCL2, CXCL4, CXCL12, CXCL13, CXCR3, cMet, CTLA4, DLL3, DLL4, DNGR-1, E-cadherin, EGFR, ENTPD1, EpCAM, FCER1, FCER1A, FCER2, FGFR, FLAP, FOLH1, Gi24, GITR, GITRL, GPR5, GP100, GPRC5D, HER2, HER3, ICOSL, ICOS, HHLA2, HMGB1, HVEM, IDO, IFNa, IgE, IGF1R, IL2Rbeta, IL1, ILIA, IL1B, IL1F10, IL2, IL4, IL4Ra, IL5, IL5R, IL6, IL7, IL7Ra, IL8, IL9, IL9R, IL10, rhIL1O, IL12, IL13, IL13Ra1, IL13Ra2, IL15, IL17, IL17Rb, IL18, IL22, IL23, IL25, IL7, IL33, IL35, ITGB4, ITK, KIR, LAG3, LAMP1, leptin, LPFS2, MHC class II, MUC-1, MUC-16, NCR3LG1, NKG2D, NKp46, NTPDase-1, OX40, OX40L, PD-1, PD-L1, PD-L2, PROM1, S152, SIRPalpha, SISP1, SLC, SPG64, ST2, STEAP1, STEAP2, Syk kinase, STEAP1, TROP2, TACI, TDO, TGFBETA, T14, TIGIT, TIM3, TLR, TLR2, TLR4, TLR5, TLR9, TMEF1, TNFa, TNFRSF7, Tp55, TREM1, TSLP, TSLPR, TWEAK, VEGF, VISTA, Vstm3, and WUCAM; VL2 is a second immunoglobulin light chain variable region that specifically binds to at least one epitope on at least one antigen selected from the group consisting of A2AR, APRIL, ATPDase, BAFF, BAFFR, BCMA, BlyS, BTK, BTLA, B7DC, B7H1, B7H2, B7H3, B7H4, B7H5, B7H6, B7H7, B7RP1, B7-4, C3, C5, CCL2, CCL3, CCL4, CCL5, CCL7, CCL8, CCL11, CCL15, CCL17, CCL19, CCL20, CCL21, CCL25 CCR3, CCR4, CD3, CD16A, CD19, CD20, CD24, CD27, CD28, CD30, CD38, CD39, CD40, CD40L, CD47, CD52, CD70, CD80, CD86, CD123, CD133, CD137, CD137L, CD160, CD272, CEACAM5, CLEC9, CLEC91, CRTH2, CSF-1, CSF-2, CSF-3, CXCL1, CXCL2, CXCL4, CXCL12, CXCL13, CXCR3, cMet, CTLA4, DLL3, DLL4, DNGR-1, E-cadherin, EGFR, ENTPD1, EpCAM, FCER1, FCER1A, FCER2, FGFR, FLAP, FOLH1, Gi24, GITR, GITRL, GPR5, GP100, GPRC5D, HER2, HER3, ICOSL, ICOS, HHLA2, HMGB1, HVEM, IDO, IFNa, IgE, IGF1R, IL2Rbeta, IL1, ILIA, IL1B, IL1F10, IL2, IL4, IL4Ra, IL5, IL5R, IL6, IL7, IL7Ra, IL8, IL9, IL9R, IL10, rhIL1O, IL12, IL13, IL13Ra1, IL13Ra2, IL15, IL17, IL17Rb, IL18, IL22, IL23, IL25, IL7, IL33, IL35, ITGB4, ITK, KIR, LAG3, LAMP1, leptin, LPFS2, MHC class II, MUC-1, MUC-16, NCR3LG1, NKG2D, NKp46, NTPDase-1, OX40, OX40L, PD-1, PD-L1, PD-L2, PROM1, S152, SIRPalpha, SISP1, SLC, SPG64, ST2, STEAP1, STEAP2, Syk kinase, STEAP1, TROP2, TACI, TDO, TGFBETA, T14, TIGIT, TIM3, TLR, TLR2, TLR4, TLR5, TLR9, TMEF1, TNFa, TNFRSF7, Tp55, TREM1, TSLP, TSLPR, TWEAK, VEGF, VISTA, Vstm3, and WUCAM; VL3 is a third immunoglobulin light chain variable region that specifically binds to at least one epitope on at least one antigen selected from the group consisting of A2AR, APRIL, ATPDase, BAFF, BAFFR, BCMA, BlyS, BTK, BTLA, B7DC, B7H1, B7H2, B7H3, B7H4, B7H5, B7H6, B7H7, B7RP1, B7-4, C3, C5, CCL2, CCL3, CCL4, CCL5, CCL7, CCL8, CCL11, CCL15, CCL17, CCL19, CCL20, CCL21, CCL25 CCR3, CCR4, CD3, CD16A, CD19, CD20, CD24, CD27, CD28, CD30, CD38, CD39, CD40, CD40L, CD47, CD52, CD70, CD80, CD86, CD123, CD133, CD137, CD137L, CD160, CD272, CEACAM5, CLEC9, CLEC91, CRTH2, CSF-1, CSF-2, CSF-3, CXCL1, CXCL2, CXCL4, CXCL12, CXCL13, CXCR3, cMet, CTLA4, DLL3, DLL4, DNGR-1, E-cadherin, EGFR, ENTPD1, EpCAM, FCER1, FCER1A, FCER2, FGFR, FLAP, FOLH1, Gi24, GITR, GITRL, GPR5, GP100, GPRC5D, HER2, HER3, ICOSL, ICOS, HHLA2, HMGB1, HVEM, IDO, IFNa, IgE, IGF1R, IL2Rbeta, IL1, ILIA, IL1B, IL1F10, IL2, IL4, IL4Ra, IL5, IL5R, IL6, IL7, IL7Ra, IL8, IL9, IL9R, IL10, rhIL1O, IL12, IL13, IL13Ra1, IL13Ra2, IL15, IL17, IL17Rb, IL18, IL22, IL23, IL25, IL7, IL33, IL35, ITGB4, ITK, KIR, LAG3, LAMP1, leptin, LPFS2, MHC class II, MUC-1, MUC-16, NCR3LG1, NKG2D, NKp46, NTPDase-1, OX40, OX40L, PD-1, PD-L1, PD-L2, PROM1, S152, SIRPalpha, SISP1, SLC, SPG64, ST2, STEAP1, STEAP2, Syk kinase, STEAP1, TROP2, TACI, TDO, TGFBETA, T14, TIGIT, TIM3, TLR, TLR2, TLR4, TLR5, TLR9, TMEF1, TNFa, TNFRSF7, Tp55, TREM1, TSLP, TSLPR, TWEAK, VEGF, VISTA, Vstm3, and WUCAM; VL4 is a fourth immunoglobulin light chain variable region that specifically binds to at least one epitope on at least one antigen selected from the group consisting of A2AR, APRIL, ATPDase, BAFF, BAFFR, BCMA, BlyS, BTK, BTLA, B7DC, B7H1, B7H2, B7H3, B7H4, B7H5, B7H6, B7H7, B7RP1, B7-4, C3, C5, CCL2, CCL3, CCL4, CCL5, CCL7, CCL8, CCL11, CCL15, CCL17, CCL19, CCL20, CCL21, CCL25 CCR3, CCR4, CD3, CD16A, CD19, CD20, CD24, CD27, CD28, CD30, CD38, CD39, CD40, CD40L, CD47, CD52, CD70, CD80, CD86, CD123, CD133, CD137, CD137L, CD160, CD272, CEACAM5, CLEC9, CLEC91, CRTH2, CSF-1, CSF-2, CSF-3, CXCL1, CXCL2, CXCL4, CXCL12, CXCL13, CXCR3, cMet, CTLA4, DLL3, DLL4, DNGR-1, E-cadherin, EGFR, ENTPD1, EpCAM, FCER1, FCER1A, FCER2, FGFR, FLAP, FOLH1, Gi24, GITR, GITRL, GPR5, GP100, GPRC5D, HER2, HER3, ICOSL, ICOS, HHLA2, HMGB1, HVEM, IDO, IFNa, IgE, IGF1R, IL2Rbeta, IL1, ILIA, IL1B, IL1F10, IL2, IL4, IL4Ra, IL5, IL5R, IL6, IL7, IL7Ra, IL8, IL9, IL9R, IL10, rhIL1O, IL12, IL13, IL13Ra1, IL13Ra2, IL15, IL17, IL17Rb, IL18, IL22, IL23, IL25, IL7, IL33, IL35, ITGB4, ITK, KIR, LAG3, LAMP1, leptin, LPFS2, MHC class II, MUC-1, MUC-16, NCR3LG1, NKG2D, NKp46, NTPDase-1, OX40, OX40L, PD-1, PD-L1, PD-L2, PROM1, S152, SIRPalpha, SISP1, SLC, SPG64, ST2, STEAP1, STEAP2, Syk kinase, STEAP1, TROP2, TACI, TDO, TGFBETA, T14, TIGIT, TIM3, TLR, TLR2, TLR4, TLR5, TLR9, TMEF1, TNFa, TNFRSF7, Tp55, TREM1, TSLP, TSLPR, TWEAK, VEGF, VISTA, Vstm3, and WUCAM; VH1 is a first immunoglobulin heavy chain variable region that specifically binds to at least one epitope on at least one antigen selected from the group consisting of A2AR, APRIL, ATPDase, BAFF, BAFFR, BCMA, BlyS, BTK, BTLA, B7DC, B7H1, B7H2, B7H3, B7H4, B7H5, B7H6, B7H7, B7RP1, B7-4, C3, C5, CCL2, CCL3, CCL4, CCL5, CCL7, CCL8, CCL11, CCL15, CCL17, CCL19, CCL20, CCL21, CCL25 CCR3, CCR4, CD3, CD16A, CD19, CD20, CD24, CD27, CD28, CD30, CD38, CD39, CD40, CD40L, CD47, CD52, CD70, CD80, CD86, CD123, CD133, CD137, CD137L, CD160, CD272, CEACAM5, CLEC9, CLEC91, CRTH2, CSF-1, CSF-2, CSF-3, CXCL1, CXCL2, CXCL4, CXCL12, CXCL13, CXCR3, cMet, CTLA4, DLL3, DLL4, DNGR-1, E-cadherin, EGFR, ENTPD1, EpCAM, FCER1, FCER1A, FCER2, FGFR, FLAP, FOLH1, Gi24, GITR, GITRL, GPR5, GP100, GPRC5D, HER2, HER3, ICOSL, ICOS, HHLA2, HMGB1, HVEM, IDO, IFNa, IgE, IGF1R, IL2Rbeta, IL1, ILIA, IL1B, IL1F10, IL2, IL4, IL4Ra, IL5, IL5R, IL6, IL7, IL7Ra, IL8, IL9, IL9R, IL10, rhIL1O, IL12, IL13, IL13Ra1, IL13Ra2, IL15, IL17, IL17Rb, IL18, IL22, IL23, IL25, IL7, IL33, IL35, ITGB4, ITK, KIR, LAG3, LAMP1, leptin, LPFS2, MHC class II, MUC-1, MUC-16, NCR3LG1, NKG2D, NKp46, NTPDase-1, OX40, OX40L, PD-1, PD-L1, PD-L2, PROM1, S152, SIRPalpha, SISP1, SLC, SPG64, ST2, STEAP1, STEAP2, Syk kinase, STEAP1, TROP2, TACI, TDO, TGFBETA, T14, TIGIT, TIM3, TLR, TLR2, TLR4, TLR5, TLR9, TMEF1, TNFa, TNFRSF7, Tp55, TREM1, TSLP, TSLPR, TWEAK, VEGF, VISTA, Vstm3, and WUCAM; VH2 is a second immunoglobulin heavy chain variable region that specifically binds to at least one epitope on at least one antigen selected from the group consisting of A2AR, APRIL, ATPDase, BAFF, BAFFR, BCMA, BlyS, BTK, BTLA, B7DC, B7H1, B7H2, B7H3, B7H4, B7H5, B7H6, B7H7, B7RP1, B7-4, C3, C5, CCL2, CCL3, CCL4, CCL5, CCL7, CCL8, CCL11, CCL15, CCL17, CCL19, CCL20, CCL21, CCL25 CCR3, CCR4, CD3, CD16A, CD19, CD20, CD24, CD27, CD28, CD30, CD38, CD39, CD40, CD40L, CD47, CD52, CD70, CD80, CD86, CD123, CD133, CD137, CD137L, CD160, CD272, CEACAM5, CLEC9, CLEC91, CRTH2, CSF-1, CSF-2, CSF-3, CXCL1, CXCL2, CXCL4, CXCL12, CXCL13, CXCR3, cMet, CTLA4, DLL3, DLL4, DNGR-1, E-cadherin, EGFR, ENTPD1, EpCAM, FCER1, FCER1A, FCER2, FGFR, FLAP, FOLH1, Gi24, GITR, GITRL, GPR5, GP100, GPRC5D, HER2, HER3, ICOSL, ICOS, HHLA2, HMGB1, HVEM, IDO, IFNa, IgE, IGF1R, IL2Rbeta, IL1, ILIA, IL1B, IL1F10, IL2, IL4, IL4Ra, IL5, IL5R, IL6, IL7, IL7Ra, IL8, IL9, IL9R, IL10, rhIL1O, IL12, IL13, IL13Ra1, IL13Ra2, IL15, IL17, IL17Rb, IL18, IL22, IL23, IL25, IL7, IL33, IL35, ITGB4, ITK, KIR, LAG3, LAMP1, leptin, LPFS2, MHC class II, MUC-1, MUC-16, NCR3LG1, NKG2D, NKp46, NTPDase-1, OX40, OX40L, PD-1, PD-L1, PD-L2, PROM1, S152, SIRPalpha, SISP1, SLC, SPG64, ST2, STEAP1, STEAP2, Syk kinase, STEAP1, TROP2, TACI, TDO, TGFBETA, T14, TIGIT, TIM3, TLR, TLR2, TLR4, TLR5, TLR9, TMEF1, TNFa, TNFRSF7, Tp55, TREM1, TSLP, TSLPR, TWEAK, VEGF, VISTA, Vstm3, and WUCAM; VH3 is a third immunoglobulin heavy chain variable region that specifically binds to at least one epitope on at least one antigen selected from the group consisting of A2AR, APRIL, ATPDase, BAFF, BAFFR, BCMA, BlyS, BTK, BTLA, B7DC, B7H1, B7H2, B7H3, B7H4, B7H5, B7H6, B7H7, B7RP1, B7-4, C3, C5, CCL2, CCL3, CCL4, CCL5, CCL7, CCL8, CCL11, CCL15, CCL17, CCL19, CCL20, CCL21, CCL25 CCR3, CCR4, CD3, CD16A, CD19, CD20, CD24, CD27, CD28, CD30, CD38, CD39, CD40, CD40L, CD47, CD52, CD70, CD80, CD86, CD123, CD133, CD137, CD137L, CD160, CD272, CEACAM5, CLEC9, CLEC91, CRTH2, CSF-1, CSF-2, CSF-3, CXCL1, CXCL2, CXCL4, CXCL12, CXCL13, CXCR3, cMet, CTLA4, DLL3, DLL4, DNGR-1, E-cadherin, EGFR, ENTPD1, EpCAM, FCER1, FCER1A, FCER2, FGFR, FLAP, FOLH1, Gi24, GITR, GITRL, GPR5, GP100, GPRC5D, HER2, HER3, ICOSL, ICOS, HHLA2, HMGB1, HVEM, IDO, IFNa, IgE, IGF1R, IL2Rbeta, IL1, ILIA, IL1B, IL1F10, IL2, IL4, IL4Ra, IL5, IL5R, IL6, IL7, IL7Ra, IL8, IL9, IL9R, IL10, rhIL1O, IL12, IL13, IL13Ra1, IL13Ra2, IL15, IL17, IL17Rb, IL18, IL22, IL23, IL25, IL7, IL33, IL35, ITGB4, ITK, KIR, LAG3, LAMP1, leptin, LPFS2, MHC class II, MUC-1, MUC-16, NCR3LG1, NKG2D, NKp46, NTPDase-1, OX40, OX40L, PD-1, PD-L1, PD-L2, PROM1, S152, SIRPalpha, SISP1, SLC, SPG64, ST2, STEAP1, STEAP2, Syk kinase, STEAP1, TROP2, TACI, TDO, TGFBETA, T14, TIGIT, TIM3, TLR, TLR2, TLR4, TLR5, TLR9, TMEF1, TNFa, TNFRSF7, Tp55, TREM1, TSLP, TSLPR, TWEAK, VEGF, VISTA, Vstm3, and WUCAM; and VH4 is a fourth immunoglobulin heavy chain variable region that specifically binds to at least one epitope on at least one antigen selected from the group consisting of A2AR, APRIL, ATPDase, BAFF, BAFFR, BCMA, BlyS, BTK, BTLA, B7DC, B7H1, B7H2, B7H3, B7H4, B7H5, B7H6, B7H7, B7RP1, B7-4, C3, C5, CCL2, CCL3, CCL4, CCL5, CCL7, CCL8, CCL11, CCL15, CCL17, CCL19, CCL20, CCL21, CCL25 CCR3, CCR4, CD3, CD16A, CD19, CD20, CD24, CD27, CD28, CD30, CD38, CD39, CD40, CD40L, CD47, CD52, CD70, CD80, CD86, CD123, CD133, CD137, CD137L, CD160, CD272, CEACAM5, CLEC9, CLEC91, CRTH2, CSF-1, CSF-2, CSF-3, CXCL1, CXCL2, CXCL4, CXCL12, CXCL13, CXCR3, cMet, CTLA4, DLL3, DLL4, DNGR-1, E-cadherin, EGFR, ENTPD1, EpCAM, FCER1, FCER1A, FCER2, FGFR, FLAP, FOLH1, Gi24, GITR, GITRL, GPR5, GP100, GPRC5D, HER2, HER3, ICOSL, ICOS, HHLA2, HMGB1, HVEM, IDO, IFNa, IgE, IGF1R, IL2Rbeta, IL1, ILIA, IL1B, IL1F10, IL2, IL4, IL4Ra, IL5, IL5R, IL6, IL7, IL7Ra, IL8, IL9, IL9R, IL10, rhIL1O, IL12, IL13, IL13Ra1, IL13Ra2, IL15, IL17, IL17Rb, IL18, IL22, IL23, IL25, IL7, IL33, IL35, ITGB4, ITK, KIR, LAG3, LAMP1, leptin, LPFS2, MHC class II, MUC-1, MUC-16, NCR3LG1, NKG2D, NKp46, NTPDase-1, OX40, OX40L, PD-1, PD-L1, PD-L2, PROM1, S152, SIRPalpha, SISP1, SLC, SPG64, ST2, STEAP1, STEAP2, Syk kinase, STEAP1, TROP2, TACI, TDO, TGFBETA, T14, TIGIT, TIM3, TLR, TLR2, TLR4, TLR5, TLR9, TMEF1, TNFa, TNFRSF7, Tp55, TREM1, TSLP, TSLPR, TWEAK, VEGF, VISTA, Vstm3, and WUCAM.

[0262] In some aspects, provided herein is an antigen binding polypeptide having a structure represented by VL1-VL2-VH2-VH1; VH1-VH2-VL2-VL1; VL1-L1-VL2-L2-VH2-L3-VH1; or VH1-L1-VH2-L2-VL2-L3-VL1; wherein VL1 is a first immunoglobulin light chain variable region that specifically binds to at least one epitope on at least one antigen selected from the group consisting of A2AR, APRIL, ATPDase, BAFF, BAFFR, BCMA, BlyS, BTK, BTLA, B7DC, B7H1, B7H2, B7H3, B7H4, B7H5, B7H6, B7H7, B7RP1, B7-4, C3, C5, CCL2, CCL3, CCL4, CCL5, CCL7, CCL8, CCL11, CCL15, CCL17, CCL19, CCL20, CCL21, CCL25 CCR3, CCR4, CD3, CD16A, CD19, CD20, CD24, CD27, CD28, CD30, CD38, CD39, CD40, CD40L, CD47, CD52, CD70, CD80, CD86, CD123, CD133, CD137, CD137L, CD160, CD272, CEACAM5, CLEC9, CLEC91, CRTH2, CSF-1, CSF-2, CSF-3, CXCL1, CXCL2, CXCL4, CXCL12, CXCL13, CXCR3, cMet, CTLA4, DLL3, DLL4, DNGR-1, E-cadherin, EGFR, ENTPD1, EpCAM, FCER1, FCER1A, FCER2, FGFR, FLAP, FOLH1, Gi24, GITR, GITRL, GPR5, GP100, GPRC5D, HER2, HER3, ICOSL, ICOS, HHLA2, HMGB1, HVEM, IDO, IFNa, IgE, IGF1R, IL2Rbeta, IL1, ILIA, IL1B, IL1F10, IL2, IL4, IL4Ra, IL5, IL5R, IL6, IL7, IL7Ra, IL8, IL9, IL9R, IL10, rhIL1O, IL12, IL13, IL13Ra1, IL13Ra2, IL15, IL17, IL17Rb, IL18, IL22, IL23, IL25, IL7, IL33, IL35, ITGB4, ITK, KIR, LAG3, LAMP1, leptin, LPFS2, MHC class II, MUC-1, MUC-16, NCR3LG1, NKG2D, NKp46, NTPDase-1, OX40, OX40L, PD-1, PD-L1, PD-L2, PROM1, S152, SIRPalpha, SISP1, SLC, SPG64, ST2, STEAP1, STEAP2, Syk kinase, STEAP1, TROP2, TACI, TDO, TGFBETA, T14, TIGIT, TIM3, TLR, TLR2, TLR4, TLR5, TLR9, TMEF1, TNFa, TNFRSF7, Tp55, TREM1, TSLP, TSLPR, TWEAK, VEGF, VISTA, Vstm3, and WUCAM; VL2 is a second immunoglobulin light chain variable region that specifically binds to at least one epitope on at least one antigen selected from the group consisting of A2AR, APRIL, ATPDase, BAFF, BAFFR, BCMA, BlyS, BTK, BTLA, B7DC, B7H1, B7H2, B7H3, B7H4, B7H5, B7H6, B7H7, B7RP1, B7-4, C3, C5, CCL2, CCL3, CCL4, CCL5, CCL7, CCL8, CCL11, CCL15, CCL17, CCL19, CCL20, CCL21, CCL25 CCR3, CCR4, CD3, CD16A, CD19, CD20, CD24, CD27, CD28, CD30, CD38, CD39, CD40, CD40L, CD47, CD52, CD70, CD80, CD86, CD123, CD133, CD137, CD137L, CD160, CD272, CEACAM5, CLEC9, CLEC91, CRTH2, CSF-1, CSF-2, CSF-3, CXCL1, CXCL2, CXCL4, CXCL12, CXCL13, CXCR3, cMet, CTLA4, DLL3, DLL4, DNGR-1, E-cadherin, EGFR, ENTPD1, EpCAM, FCER1, FCER1A, FCER2, FGFR, FLAP, FOLH1, Gi24, GITR, GITRL, GPR5, GP100, GPRC5D, HER2, HER3, ICOSL, ICOS, HHLA2, HMGB1, HVEM, IDO, IFNa, IgE, IGF1R, IL2Rbeta, IL1, ILIA, IL1B, IL1F10, IL2, IL4, IL4Ra, IL5, IL5R, IL6, IL7, IL7Ra, IL8, IL9, IL9R, IL10, rhIL1O, IL12, IL13, IL13Ra1, IL13Ra2, IL15, IL17, IL17Rb, IL18, IL22, IL23, IL25, IL7, IL33, IL35, ITGB4, ITK, KIR, LAG3, LAMP1, leptin, LPFS2, MHC class II, MUC-1, MUC-16, NCR3LG1, NKG2D, NKp46, NTPDase-1, OX40, OX40L, PD-1, PD-L1, PD-L2, PROM1, S152, SIRPalpha, SISP1, SLC, SPG64, ST2, STEAP1, STEAP2, Syk kinase, STEAP1, TROP2, TACI, TDO, TGFBETA, T14, TIGIT, TIM3, TLR, TLR2, TLR4, TLR5, TLR9, TMEF1, TNFa, TNFRSF7, Tp55, TREM1, TSLP, TSLPR, TWEAK, VEGF, VISTA, Vstm3, and WUCAM; VH1 is a first immunoglobulin heavy chain variable region that specifically binds to at least one epitope on at least one antigen selected from the group consisting of A2AR, APRIL, ATPDase, BAFF, BAFFR, BCMA, BlyS, BTK, BTLA, B7DC, B7H1, B7H2, B7H3, B7H4, B7H5, B7H6, B7H7, B7RP1, B7-4, C3, C5, CCL2, CCL3, CCL4, CCL5, CCL7, CCL8, CCL11, CCL15, CCL17, CCL19, CCL20, CCL21, CCL25 CCR3, CCR4, CD3, CD16A, CD19, CD20, CD24, CD27, CD28, CD30, CD38, CD39, CD40, CD40L, CD47, CD52, CD70, CD80, CD86, CD123, CD133, CD137, CD137L, CD160, CD272, CEACAM5, CLEC9, CLEC91, CRTH2, CSF-1, CSF-2, CSF-3, CXCL1, CXCL2, CXCL4, CXCL12, CXCL13, CXCR3, cMet, CTLA4, DLL3, DLL4, DNGR-1, E-cadherin, EGFR, ENTPD1, EpCAM, FCER1, FCER1A, FCER2, FGFR, FLAP, FOLH1, Gi24, GITR, GITRL, GPR5, GP100, GPRC5D, HER2, HER3, ICOSL, ICOS, HHLA2, HMGB1, HVEM, IDO, IFNa, IgE, IGF1R, IL2Rbeta, IL1, ILIA, IL1B, IL1F10, IL2, IL4, IL4Ra, IL5, IL5R, IL6, IL7, IL7Ra, IL8, IL9, IL9R, IL10, rhIL1O, IL12, IL13, IL13Ra1, IL13Ra2, IL15, IL17, IL17Rb, IL18, IL22, IL23, IL25, IL7, IL33, IL35, ITGB4, ITK, KIR, LAG3, LAMP1, leptin, LPFS2, MHC class II, MUC-1, MUC-16, NCR3LG1, NKG2D, NKp46, NTPDase-1, OX40, OX40L, PD-1, PD-L1, PD-L2, PROM1, S152, SIRPalpha, SISP1, SLC, SPG64, ST2, STEAP1, STEAP2, Syk kinase, STEAP1, TROP2, TACI, TDO, TGFBETA, T14, TIGIT, TIM3, TLR, TLR2, TLR4, TLR5, TLR9, TMEF1, TNFa, TNFRSF7, Tp55, TREM1, TSLP, TSLPR, TWEAK, VEGF, VISTA, Vstm3, and WUCAM; VH2 is a second immunoglobulin heavy chain variable region that specifically binds to at least one epitope on at least one antigen selected from the group consisting of A2AR, APRIL, ATPDase, BAFF, BAFFR, BCMA, BlyS, BTK, BTLA, B7DC, B7H1, B7H2, B7H3, B7H4, B7H5, B7H6, B7H7, B7RP1, B7-4, C3, C5, CCL2, CCL3, CCL4, CCL5, CCL7, CCL8, CCL11, CCL15, CCL17, CCL19, CCL20, CCL21, CCL25 CCR3, CCR4, CD3, CD16A, CD19, CD20, CD24, CD27, CD28, CD30, CD38, CD39, CD40, CD40L, CD47, CD52, CD70, CD80, CD86, CD123, CD133, CD137, CD137L, CD160, CD272, CEACAM5, CLEC9, CLEC91, CRTH2, CSF-1, CSF-2, CSF-3, CXCL1, CXCL2, CXCL4, CXCL12, CXCL13, CXCR3, cMet, CTLA4, DLL3, DLL4, DNGR-1, E-cadherin, EGFR, ENTPD1, EpCAM, FCER1, FCER1A, FCER2, FGFR, FLAP, FOLH1, Gi24, GITR, GITRL, GPR5, GP100, GPRC5D, HER2, HER3, ICOSL, ICOS, HHLA2, HMGB1, HVEM, IDO, IFNa, IgE, IGF1R, IL2Rbeta, IL1, ILIA, IL1B, IL1F10, IL2, IL4, IL4Ra, IL5, IL5R, IL6, IL7, IL7Ra, IL8, IL9, IL9R, IL10, rhIL1O, IL12, IL13, IL13Ra1, IL13Ra2, IL15, IL17, IL17Rb, IL18, IL22, IL23, IL25, IL7, IL33, IL35, ITGB4, ITK, KIR, LAG3, LAMP1, leptin, LPFS2, MHC class II, MUC-1, MUC-16, NCR3LG1, NKG2D, NKp46, NTPDase-1, OX40, OX40L, PD-1, PD-L1, PD-L2, PROM1, S152, SIRPalpha, SISP1, SLC, SPG64, ST2, STEAP1, STEAP2, Syk kinase, STEAP1, TROP2, TACI, TDO, TGFBETA, T14, TIGIT, TIM3, TLR, TLR2, TLR4, TLR5, TLR9, TMEF1, TNFa, TNFRSF7, Tp55, TREM1, TSLP, TSLPR, TWEAK, VEGF, VISTA, Vstm3, and WUCAM; L1, L2 and L3 are amino acid linkers; and wherein said antigen binding polypeptide further comprises at least one of the following (i)-(xxi); (i) an Fc region having an optional immunoglobulin hinge, wherein the immunoglobulin hinge comprises an upper hinge region, a middle hinge region, a lower hinge region, or a combination thereof; (ii) a linker selected from the group consisting of L1, L2 or L3 having a length of from about 1 amino acid to about 50 amino acids; (iii) a linker selected from the group consisting of L1, L2 or L3 selected from the group consisting of SEQ ID NO: 1, SEQ ID NO: 2, SEQ ID NO: 3, SEQ ID NO: 4, SEQ ID NO: 5, SEQ ID NO: 6, SEQ ID NO: 7, SEQ ID NO: 8, SEQ ID NO: 9, SEQ ID NO: 10, SEQ ID NO: 11, SEQ ID NO: 12, SEQ ID NO: 13, SEQ ID NO: 14, SEQ ID NO: 15, SEQ ID NO: 16, SEQ ID NO: 17, SEQ ID NO: 18, SEQ ID NO: 19, SEQ ID NO: 681, SEQ ID NO: 682, SEQ ID NO: 683, SEQ ID NO: 684, SEQ ID NO: 685, SEQ ID NO: 686, SEQ ID NO: 687 or SEQ ID NO: 688, or a sequence having at least 50%, at least 60%, at least 70%, at least 80%, at least 90%, or at least 95% identity to any one of SEQ ID NOs:1-19 or 681-688; (iv) a linker selected from L1, L2 or L3 which is non-immunogenic; (v) a linker selected from L1, L2 or L3 wherein said linker does not contain a consensus T cell epitope; (vi) an Fc region comprising at least one knob-into-hole modification; (vii) a detectable label; (viii) a detectable label selected from the group consisting of a radioactive label, chemiluminescent label, fluorescent label, enzyme, or peptide tag, or a combination thereof; (ix) a peptide tag; (x) a peptide tag selected from a polyhistidine tag consisting of from about 4 to about 10 histidine residues; (xi) a peptide tag having about 8 histidine residues; (xii) the polypeptide is conjugated to an agent to form an antibody-agent conjugate; (xiii) an antibody-agent conjugate wherein the agent is selected from the group consisting of a cytotoxic agent, an immunomodulating agent, an imaging agent, a therapeutic protein, or a combination thereof; (xiv) an antigen binding polypeptide having an equilibrium dissociation constant (KD) of from about 10 μM to about 1 pM when bound to an epitope on a target antigen or when complexed with another antigen binding polypeptide to form an antigen binding polypeptide complex having at least two antigen binding polypeptides; (xv) an antibody or antigen binding fragment thereof; (xvi) an antibody or antigen binding fragment thereof selected from the group consisting of IgG, IgM, IgE, IgA or IgD; (xvii) an antibody or antigen binding fragment thereof selected from an IgG antibody selected from the group consisting of IgG1, IgG2, IgG3 or IgG4; (xviii) an antibody or antigen binding fragment selected from the group consisting of Fab, scFab, Fab′, F(ab′)₂, Fv or scFv; (xix) an antigen binding polypeptide having an effector function mutation; (xx) an antigen bind polypeptide which, when formed into an antigen binding polypeptide complex, is an IgG1 or IgG4 antibody and the knob-into-hole modification comprises (i) knob substitutions of S354C and T366W and hole substitutions of Y349C, T366S, L368A and Y407V; (ii) hole substitutions of L234A, L235A and P239A; (iii) hole substitutions of L234A and L235A; (iv) hole substitutions of M428L and N433S; (v) hole substitutions of M252Y, S254T and T256E; or (vi) a combination thereof, based on the EU numbering scheme; and (xxi) an antigen binding polypeptide as part of a chimeric receptor antigen.

[0263] In some aspects, provided herein is an antigen binding polypeptide complex comprising a first polypeptide and a second polypeptide; wherein the first polypeptide has a structure represented by VL1-VL2-VH2-VH1; VH1-VH2-VL2-VL1; VL1-L1-VL2-L2-VH2-L3-VH1; or VH1-L1-VH2-L2-VL2-L3-VL1; wherein the second polypeptide has a structure represented by VL1-VL2-VH2-VH1; VH1-VH2-VL2-VL1; VL1-L1-VL2-L2-VH2-L3-VH1; or VH1-L1-VH2-L2-VL2-L3-VL1; wherein VL1 is a first immunoglobulin light chain variable region that specifically binds to at least one epitope on at least one antigen selected from the group consisting of A2AR, APRIL, ATPDase, BAFF, BAFFR, BCMA, BlyS, BTK, BTLA, B7DC, B7H1, B7H2, B7H3, B7H4, B7H5, B7H6, B7H7, B7RP1, B7-4, C3, C5, CCL2, CCL3, CCL4, CCL5, CCL7, CCL8, CCL11, CCL15, CCL17, CCL19, CCL20, CCL21, CCL25 CCR3, CCR4, CD3, CD16A, CD19, CD20, CD24, CD27, CD28, CD30, CD38, CD39, CD40, CD40L, CD47, CD52, CD70, CD80, CD86, CD123, CD133, CD137, CD137L, CD160, CD272, CEACAM5, CLEC9, CLEC91, CRTH2, CSF-1, CSF-2, CSF-3, CXCL1, CXCL2, CXCL4, CXCL12, CXCL13, CXCR3, cMet, CTLA4, DLL3, DLL4, DNGR-1, E-cadherin, EGFR, ENTPD1, EpCAM, FCER1, FCER1A, FCER2, FGFR, FLAP, FOLH1, Gi24, GITR, GITRL, GPR5, GP100, GPRC5D, HER2, HER3, ICOSL, ICOS, HHLA2, HMGB1, HVEM, IDO, IFNa, IgE, IGF1R, IL2Rbeta, IL1, ILIA, IL1B, IL1F10, IL2, IL4, IL4Ra, IL5, IL5R, IL6, IL7, IL7Ra, IL8, IL9, IL9R, IL10, rhIL1O, IL12, IL13, IL13Ra1, IL13Ra2, IL15, IL17, IL17Rb, IL18, IL22, IL23, IL25, IL7, IL33, IL35, ITGB4, ITK, KIR, LAG3, LAMP1, leptin, LPFS2, MHC class II, MUC-1, MUC-16, NCR3LG1, NKG2D, NKp46, NTPDase-1, OX40, OX40L, PD-1, PD-L1, PD-L2, PROM1, S152, SIRPalpha, SISP1, SLC, SPG64, ST2, STEAP1, STEAP2, Syk kinase, STEAP1, TROP2, TACI, TDO, TGFBETA, T14, TIGIT, TIM3, TLR, TLR2, TLR4, TLR5, TLR9, TMEF1, TNFa, TNFRSF7, Tp55, TREM1, TSLP, TSLPR, TWEAK, VEGF, VISTA, Vstm3, and WUCAM; VL2 is a second immunoglobulin light chain variable region that specifically binds to at least one epitope on at least one antigen selected from the group consisting of A2AR, APRIL, ATPDase, BAFF, BAFFR, BCMA, BlyS, BTK, BTLA, B7DC, B7H1, B7H2, B7H3, B7H4, B7H5, B7H6, B7H7, B7RP1, B7-4, C3, C5, CCL2, CCL3, CCL4, CCL5, CCL7, CCL8, CCL11, CCL15, CCL17, CCL19, CCL20, CCL21, CCL25 CCR3, CCR4, CD3, CD16A, CD19, CD20, CD24, CD27, CD28, CD30, CD38, CD39, CD40, CD40L, CD47, CD52, CD70, CD80, CD86, CD123, CD133, CD137, CD137L, CD160, CD272, CEACAM5, CLEC9, CLEC91, CRTH2, CSF-1, CSF-2, CSF-3, CXCL1, CXCL2, CXCL4, CXCL12, CXCL13, CXCR3, cMet, CTLA4, DLL3, DLL4, DNGR-1, E-cadherin, EGFR, ENTPD1, EpCAM, FCER1, FCER1A, FCER2, FGFR, FLAP, FOLH1, Gi24, GITR, GITRL, GPR5, GP100, GPRC5D, HER2, HER3, ICOSL, ICOS, HHLA2, HMGB1, HVEM, IDO, IFNa, IgE, IGF1R, IL2Rbeta, IL1, ILIA, IL1B, IL1F10, IL2, IL4, IL4Ra, IL5, IL5R, IL6, IL7, IL7Ra, IL8, IL9, IL9R, IL10, rhIL1O, IL12, IL13, IL13Ra1, IL13Ra2, IL15, IL17, IL17Rb, IL18, IL22, IL23, IL25, IL7, IL33, IL35, ITGB4, ITK, KIR, LAG3, LAMP1, leptin, LPFS2, MHC class II, MUC-1, MUC-16, NCR3LG1, NKG2D, NKp46, NTPDase-1, OX40, OX40L, PD-1, PD-L1, PD-L2, PROM1, S152, SIRPalpha, SISP1, SLC, SPG64, ST2, STEAP1, STEAP2, Syk kinase, STEAP1, TROP2, TACI, TDO, TGFBETA, T14, TIGIT, TIM3, TLR, TLR2, TLR4, TLR5, TLR9, TMEF1, TNFa, TNFRSF7, Tp55, TREM1, TSLP, TSLPR, TWEAK, VEGF, VISTA, Vstm3, and WUCAM; VH1 is a first immunoglobulin heavy chain variable region that specifically binds to at least one epitope on at least one antigen selected from the group consisting of A2AR, APRIL, ATPDase, BAFF, BAFFR, BCMA, BlyS, BTK, BTLA, B7DC, B7H1, B7H2, B7H3, B7H4, B7H5, B7H6, B7H7, B7RP1, B7-4, C3, C5, CCL2, CCL3, CCL4, CCL5, CCL7, CCL8, CCL11, CCL15, CCL17, CCL19, CCL20, CCL21, CCL25 CCR3, CCR4, CD3, CD16A, CD19, CD20, CD24, CD27, CD28, CD30, CD38, CD39, CD40, CD40L, CD47, CD52, CD70, CD80, CD86, CD123, CD133, CD137, CD137L, CD160, CD272, CEACAM5, CLEC9, CLEC91, CRTH2, CSF-1, CSF-2, CSF-3, CXCL1, CXCL2, CXCL4, CXCL12, CXCL13, CXCR3, cMet, CTLA4, DLL3, DLL4, DNGR-1, E-cadherin, EGFR, ENTPD1, EpCAM, FCER1, FCER1A, FCER2, FGFR, FLAP, FOLH1, Gi24, GITR, GITRL, GPR5, GP100, GPRC5D, HER2, HER3, ICOSL, ICOS, HHLA2, HMGB1, HVEM, IDO, IFNa, IgE, IGF1R, IL2Rbeta, IL1, ILIA, IL1B, IL1F10, IL2, IL4, IL4Ra, IL5, IL5R, IL6, IL7, IL7Ra, IL8, IL9, IL9R, IL10, rhIL1O, IL12, IL13, IL13Ra1, IL13Ra2, IL15, IL17, IL17Rb, IL18, IL22, IL23, IL25, IL7, IL33, IL35, ITGB4, ITK, KIR, LAG3, LAMP1, leptin, LPFS2, MHC class II, MUC-1, MUC-16, NCR3LG1, NKG2D, NKp46, NTPDase-1, OX40, OX40L, PD-1, PD-L1, PD-L2, PROM1, S152, SIRPalpha, SISP1, SLC, SPG64, ST2, STEAP1, STEAP2, Syk kinase, STEAP1, TROP2, TACI, TDO, TGFBETA, T14, TIGIT, TIM3, TLR, TLR2, TLR4, TLR5, TLR9, TMEF1, TNFa, TNFRSF7, Tp55, TREM1, TSLP, TSLPR, TWEAK, VEGF, VISTA, Vstm3, and WUCAM; VH2 is a second immunoglobulin heavy chain variable region that specifically binds to at least one epitope on at least one antigen selected from the group consisting of A2AR, APRIL, ATPDase, BAFF, BAFFR, BCMA, BlyS, BTK, BTLA, B7DC, B7H1, B7H2, B7H3, B7H4, B7H5, B7H6, B7H7, B7RP1, B7-4, C3, C5, CCL2, CCL3, CCL4, CCL5, CCL7, CCL8, CCL11, CCL15, CCL17, CCL19, CCL20, CCL21, CCL25 CCR3, CCR4, CD3, CD16A, CD19, CD20, CD24, CD27, CD28, CD30, CD38, CD39, CD40, CD40L, CD47, CD52, CD70, CD80, CD86, CD123, CD133, CD137, CD137L, CD160, CD272, CEACAM5, CLEC9, CLEC91, CRTH2, CSF-1, CSF-2, CSF-3, CXCL1, CXCL2, CXCL4, CXCL12, CXCL13, CXCR3, cMet, CTLA4, DLL3, DLL4, DNGR-1, E-cadherin, EGFR, ENTPD1, EpCAM, FCER1, FCER1A, FCER2, FGFR, FLAP, FOLH1, Gi24, GITR, GITRL, GPR5, GP100, GPRC5D, HER2, HER3, ICOSL, ICOS, HHLA2, HMGB1, HVEM, IDO, IFNa, IgE, IGF1R, IL2Rbeta, IL1, ILIA, IL1B, IL1F10, IL2, IL4, IL4Ra, IL5, IL5R, IL6, IL7, IL7Ra, IL8, IL9, IL9R, IL10, rhIL1O, IL12, IL13, IL13Ra1, IL13Ra2, IL15, IL17, IL17Rb, IL18, IL22, IL23, IL25, IL7, IL33, IL35, ITGB4, ITK, KIR, LAG3, LAMP1, leptin, LPFS2, MHC class II, MUC-1, MUC-16, NCR3LG1, NKG2D, NKp46, NTPDase-1, OX40, OX40L, PD-1, PD-L1, PD-L2, PROM1, S152, SIRPalpha, SISP1, SLC, SPG64, ST2, STEAP1, STEAP2, Syk kinase, STEAP1, TROP2, TACI, TDO, TGFBETA, T14, TIGIT, TIM3, TLR, TLR2, TLR4, TLR5, TLR9, TMEF1, TNFa, TNFRSF7, Tp55, TREM1, TSLP, TSLPR, TWEAK, VEGF, VISTA, Vstm3, and WUCAM; L1, L2 and L3 are amino acid linkers; and wherein said antigen binding polypeptide complex further comprises at least one of the following (i)-(xxi); (i) an Fc region having an optional immunoglobulin hinge, wherein the immunoglobulin hinge comprises an upper hinge region, a middle hinge region, a lower hinge region, or a combination thereof; (ii) a linker selected from the group consisting of L1, L2 or L3 having a length of from about 1 amino acid to about 50 amino acids; (iii) a linker selected from the group consisting of L1, L2 or L3 selected from the group consisting of SEQ ID NO: 1, SEQ ID NO: 2, SEQ ID NO: 3, SEQ ID NO: 4, SEQ ID NO: 5, SEQ ID NO: 6, SEQ ID NO: 7, SEQ ID NO: 8, SEQ ID NO: 9, SEQ ID NO: 10, SEQ ID NO: 11, SEQ ID NO: 12, SEQ ID NO: 13, SEQ ID NO: 14, SEQ ID NO: 15, SEQ ID NO: 16, SEQ ID NO: 17, SEQ ID NO: 18, SEQ ID NO: 19, SEQ ID NO: 681, SEQ ID NO: 682, SEQ ID NO: 683, SEQ ID NO: 684, SEQ ID NO: 685, SEQ ID NO: 686, SEQ ID NO: 687, or SEQ ID NO: 688, or a sequence having at least 50%, at least 60%, at least 70%, at least 80%, at least 90%, or at least 95% identity to any one of SEQ ID NOs:1-19 or 681-688; (iv) a linker selected from L1, L2 or L3 which is non-immunogenic; (v) a linker selected from L1, L2 or L3 wherein said linker does not contain a consensus T cell epitope; (vi) an Fc region comprising at least one knob-into-hole modification; (vii) a detectable label; (viii) a detectable label selected from the group consisting of a radioactive label, chemiluminescent label, fluorescent label, enzyme, or peptide tag, or a combination thereof; (ix) a peptide tag; (x) a peptide tag selected from a polyhistidine tag consisting of from about 4 to about 10 histidine residues; (xi) a peptide tag having about 8 histidine residues; (xii) the polypeptide is conjugated to an agent to form an antibody-agent conjugate; (xiii) an antibody-agent conjugate wherein the agent is selected from the group consisting of a cytotoxic agent, an immunomodulating agent, an imaging agent, a therapeutic protein, or a combination thereof; (xiv) an antigen binding polypeptide having an equilibrium dissociation constant (KD) of from about 10 μM to about 1 pM when bound to an epitope on a target antigen or when complexed with another antigen binding polypeptide to form an antigen binding polypeptide complex having at least two antigen binding polypeptides; (xv) an antibody or antigen binding fragment thereof; (xvi) an antibody or antigen binding fragment thereof selected from the group consisting of IgG, IgM, IgE, IgA or IgD; (xvii) an antibody or antigen binding fragment thereof selected from an IgG antibody selected from the group consisting of IgG1, IgG2, IgG3 or IgG4; (xviii) an antibody or antigen binding fragment selected from the group consisting of Fab, scFab, Fab′, F(ab′)₂, Fv or scFv; (xix) an antigen binding polypeptide having an effector function mutation; (xx) an antigen bind polypeptide which, when formed into an antigen binding polypeptide complex, is an IgG1 or IgG4 antibody and the knob-into-hole modification comprises (i) knob substitutions of S354C and T366W and hole substitutions of Y349C, T366S, L368A and Y407V; (ii) hole substitutions of L234A, L235A and P239A; (iii) hole substitutions of L234A and L235A; (iv) hole substitutions of M428L and N433S; (v) hole substitutions of M252Y, S254T and T256E; or (vi) a combination thereof, based on the EU numbering scheme; and (xxi) an antigen binding polypeptide as part of a chimeric receptor antigen.

[0264] In some aspects, the invention is directed to antigen binding polypeptides and antigen binding polypeptide complexes having a structure represented by VL1-VL2-VH2-VH1 or VH1-VH2-VL2-VL1 that specifically binds to an HIV protein. In some aspects, the antigen binding polypeptide or antigen binding polypeptide complex contains an amino acid linker between any two regions denoted in a structure described herein. In some aspects, the antigen binding polypeptide or antigen binding polypeptide complex can contain one or more Fc region, CH1 region, or CL region, CH3 region or any combination thereof. In some aspects, the Fc region, CH1 region, CL region and/or CH3 is located at the carboxy terminus of the antigen binding polypeptide, and is optionally linked to polypeptide by at least one amino acid linker. In some aspects, the Fc region comprises an amino acid sequence of any one of SEQ ID NOs:391-404 or an amino acid sequence having at least 80%, at least 85%, at least 90%, at least 95%, at least 96%, at least 97%, at least 98%, or at least 99% identity to any one of SEQ ID NOs:391-404. In some aspects, the CH1 region comprises an amino acid sequence of any one of SEQ ID NOs:405-409 or an amino acid sequence having at least 80%, at least 85%, at least 90%, at least 95%, at least 96%, at least 97%, at least 98%, or at least 99% identity to any one of SEQ ID NOs:405-409. In some aspects, the CL region comprises an amino acid sequence of SEQ ID NO:420 or 421 or an amino acid sequence having at least 80%, at least 85%, at least 90%, at least 95%, at least 96%, at least 97%, at least 98% or at least 99% identity to SEQ ID NO:420 or 421. In some aspects, the antigen binding polypeptide complex is an antibody or antigen binding fragment thereof.

[0265] Specific binding to an HIV protein includes, but is not limited to, specific binding to one or more HIV proteins and specific binding to one or more epitopes on the same HIV protein. In some aspects, the HIV protein is selected from the group consisting of an HIV envelope protein, an HIV structural protein, an HIV functional protein, or an HIV accessory protein. In some aspects, the HIV envelope protein is HIV envelope glycoprotein (Env), HIV envelope glycoprotein gp160, HIV envelope surface glycoprotein gp120, or HIV transmembrane envelope protein gp41. In some aspects, the HIV structural protein is p17, p24, p7 or p55. In some aspects, the HIV functional protein is p66, HIV-1 protease (PR) or p31. In some aspects, the HIV accessory protein is Nef, Tat, Rev, Vif, Vpr or Vpu.

[0266] In some aspects of an antigen binding polypeptide or antigen binding polypeptide complex provided herein, VH1 is a first immunoglobulin heavy chain variable region that specifically binds to at least one epitope on at least one antigen selected from the group consisting of Env, gp160, gp120, gp41, p17, p24, p7, p55, p66, p31, Nef, Tat, Rev, Vif, Vpr and Vpu. In some aspects, VH1 specifically binds to at least one epitope on Env. In some aspects, VH1 specifically binds to at least one epitope on gp160. In some aspects, VH1 specifically binds to at least one epitope on gp120. In some aspects, VH1 specifically binds to at least one epitope on gp41. In some aspects, VH1 specifically binds to at least one epitope on p17. In some aspects, VH1 specifically binds to at least one epitope on p24. In some aspects, VH1 specifically binds to at least one epitope on p7. In some aspects, VH1 specifically binds to at least one epitope on p55. In some aspects, VH1 specifically binds to at least one epitope on p66. In some aspects, VH1 specifically binds to at least one epitope on p31. In some aspects, VH1 specifically binds to at least one epitope on Nef. In some aspects, VH1 specifically binds to at least one epitope on Tat. In some aspects, VH1 specifically binds to at least one epitope on Rev. In some aspects, VH1 specifically binds to at least one epitope on Vif. In some aspects, VH1 specifically binds to at least one epitope on Vpr. In some aspects, VH1 specifically binds to at least one epitope on Vpu.

[0267] In some aspects of an antigen binding polypeptide or antigen binding polypeptide complex provided herein, VH2 is a second immunoglobulin heavy chain variable region that specifically binds to at least one epitope on at least one antigen selected from the group consisting of Env, gp160, gp120, gp41, p17, p24, p7, p55, p66, p31, Nef, Tat, Rev, Vif, Vpr and Vpu. In some aspects, VH2 specifically binds to at least one epitope on Env. In some aspects, VH2 specifically binds to at least one epitope on gp160. In some aspects, VH2 specifically binds to at least one epitope on gp120. In some aspects, VH2 specifically binds to at least one epitope on gp41. In some aspects, VH2 specifically binds to at least one epitope on p17. In some aspects, VH2 specifically binds to at least one epitope on p24. In some aspects, VH2 specifically binds to at least one epitope on p7. In some aspects, VH2 specifically binds to at least one epitope on p55. In some aspects, VH2 specifically binds to at least one epitope on p66. In some aspects, VH2 specifically binds to at least one epitope on p31. In some aspects, VH2 specifically binds to at least one epitope on Nef. In some aspects, VH2 specifically binds to at least one epitope on Tat. In some aspects, VH2 specifically binds to at least one epitope on Rev. In some aspects, VH2 specifically binds to at least one epitope on Vif. In some aspects, VH2 specifically binds to at least one epitope on Vpr. In some aspects, VH2 specifically binds to at least one epitope on Vpu.

[0268] In some aspects of an antigen binding polypeptide or antigen binding polypeptide complex provided herein, VH3 is a third immunoglobulin heavy chain variable region that specifically binds to at least one epitope on at least one antigen selected from the group consisting of Env, gp160, gp120, gp41, p17, p24, p7, p55, p66, p31, Nef, Tat, Rev, Vif, Vpr and Vpu. In some aspects, VH3 specifically binds to at least one epitope on Env. In some aspects, VH3 specifically binds to at least one epitope on gp160. In some aspects, VH3 specifically binds to at least one epitope on gp120. In some aspects, VH3 specifically binds to at least one epitope on gp41. In some aspects, VH3 specifically binds to at least one epitope on p17. In some aspects, VH3 specifically binds to at least one epitope on p24. In some aspects, VH3 specifically binds to at least one epitope on p7. In some aspects, VH3 specifically binds to at least one epitope on p55. In some aspects, VH3 specifically binds to at least one epitope on p66. In some aspects, VH3 specifically binds to at least one epitope on p31. In some aspects, VH3 specifically binds to at least one epitope on Nef. In some aspects, VH3 specifically binds to at least one epitope on Tat. In some aspects, VH3 specifically binds to at least one epitope on Rev. In some aspects, VH3 specifically binds to at least one epitope on Vif. In some aspects, VH3 specifically binds to at least one epitope on Vpr. In some aspects, VH3 specifically binds to at least one epitope on Vpu.

[0269] In some aspects of an antigen binding polypeptide or antigen binding polypeptide complex provided herein, VH4 is a fourth immunoglobulin heavy chain variable region that specifically binds to at least one epitope on at least one antigen selected from the group consisting of Env, gp160, gp120, gp41, p17, p24, p7, p55, p66, p31, Nef, Tat, Rev, Vif, Vpr and Vpu. In some aspects, VH4 specifically binds to at least one epitope on Env. In some aspects, VH4 specifically binds to at least one epitope on gp160. In some aspects, VH4 specifically binds to at least one epitope on gp120. In some aspects, VH4 specifically binds to at least one epitope on gp41. In some aspects, VH4 specifically binds to at least one epitope on p17. In some aspects, VH4 specifically binds to at least one epitope on p24. In some aspects, VH4 specifically binds to at least one epitope on p7. In some aspects, VH4 specifically binds to at least one epitope on p55. In some aspects, VH4 specifically binds to at least one epitope on p66. In some aspects, VH4 specifically binds to at least one epitope on p31. In some aspects, VH4 specifically binds to at least one epitope on Nef. In some aspects, VH4 specifically binds to at least one epitope on Tat. In some aspects, VH4 specifically binds to at least one epitope on Rev. In some aspects, VH4 specifically binds to at least one epitope on Vif. In some aspects, VH4 specifically binds to at least one epitope on Vpr. In some aspects, VH4 specifically binds to at least one epitope on Vpu.

[0270] In some aspects of an antigen binding polypeptide or antigen binding polypeptide complex provided herein, VL1 is a first immunoglobulin light chain variable region that specifically binds to at least one epitope on at least one antigen selected from the group consisting of Env, gp160, gp120, gp41, p17, p24, p7, p55, p66, p31, Nef, Tat, Rev, Vif, Vpr and Vpu. In some aspects, VL1 specifically binds to at least one epitope on Env. In some aspects, VL1 specifically binds to at least one epitope on gp160. In some aspects, VL1 specifically binds to at least one epitope on gp120. In some aspects, VL1 specifically binds to at least one epitope on gp41. In some aspects, VL1 specifically binds to at least one epitope on p17. In some aspects, VL1 specifically binds to at least one epitope on p24. In some aspects, VL1 specifically binds to at least one epitope on p7. In some aspects, VL1 specifically binds to at least one epitope on p55. In some aspects, VL1 specifically binds to at least one epitope on p66. In some aspects, VL1 specifically binds to at least one epitope on p31. In some aspects, VL1 specifically binds to at least one epitope on Nef. In some aspects, VL1 specifically binds to at least one epitope on Tat. In some aspects, VL1 specifically binds to at least one epitope on Rev. In some aspects, VL1 specifically binds to at least one epitope on Vif. In some aspects, VL1 specifically binds to at least one epitope on Vpr. In some aspects, VL1 specifically binds to at least one epitope on Vpu.

[0271] In some aspects of an antigen binding polypeptide or antigen binding polypeptide complex provided herein, VL2 is a second immunoglobulin light chain variable region that specifically binds to at least one epitope on at least one antigen selected from the group consisting of Env, gp160, gp120, gp41, p17, p24, p7, p55, p66, p31, Nef, Tat, Rev, Vif, Vpr and Vpu. In some aspects, VL2 specifically binds to at least one epitope on Env. In some aspects, VL2 specifically binds to at least one epitope on gp160. In some aspects, VL2 specifically binds to at least one epitope on gp120. In some aspects, VL2 specifically binds to at least one epitope on gp41. In some aspects, VL2 specifically binds to at least one epitope on p17. In some aspects, VL2 specifically binds to at least one epitope on p24. In some aspects, VL2 specifically binds to at least one epitope on p7. In some aspects, VL2 specifically binds to at least one epitope on p55. In some aspects, VL2 specifically binds to at least one epitope on p66. In some aspects, VL2 specifically binds to at least one epitope on p31. In some aspects, VL2 specifically binds to at least one epitope on Nef. In some aspects, VL2 specifically binds to at least one epitope on Tat. In some aspects, VL2 specifically binds to at least one epitope on Rev. In some aspects, VL2 specifically binds to at least one epitope on Vif. In some aspects, VL2 specifically binds to at least one epitope on Vpr. In some aspects, VL2 specifically binds to at least one epitope on Vpu.

[0272] In some aspects of an antigen binding polypeptide or antigen binding polypeptide complex provided herein, VL3 is a third immunoglobulin light chain variable region that specifically binds to at least one epitope on at least one antigen selected from the group consisting of Env, gp160, gp120, gp41, p17, p24, p7, p55, p66, p31, Nef, Tat, Rev, Vif, Vpr and Vpu. In some aspects, VL3 specifically binds to at least one epitope on Env. In some aspects, VL3 specifically binds to at least one epitope on gp160. In some aspects, VL3 specifically binds to at least one epitope on gp120. In some aspects, VL3 specifically binds to at least one epitope on gp41. In some aspects, VL3 specifically binds to at least one epitope on p17. In some aspects, VL3 specifically binds to at least one epitope on p24. In some aspects, VL3 specifically binds to at least one epitope on p7. In some aspects, VL3 specifically binds to at least one epitope on p55. In some aspects, VL3 specifically binds to at least one epitope on p66. In some aspects, VL3 specifically binds to at least one epitope on p31. In some aspects, VL3 specifically binds to at least one epitope on Nef. In some aspects, VL3 specifically binds to at least one epitope on Tat. In some aspects, VL3 specifically binds to at least one epitope on Rev. In some aspects, VL3 specifically binds to at least one epitope on Vif. In some aspects, VL3 specifically binds to at least one epitope on Vpr. In some aspects, VL3 specifically binds to at least one epitope on Vpu.

[0273] In some aspects of an antigen binding polypeptide or antigen binding polypeptide complex provided herein, VL4 is a fourth immunoglobulin light chain variable region that specifically binds to at least one epitope on at least one antigen selected from the group consisting of Env, gp160, gp120, gp41, p17, p24, p7, p55, p66, p31, Nef, Tat, Rev, Vif, Vpr and Vpu. In some aspects, VL4 specifically binds to at least one epitope on Env. In some aspects, VL4 specifically binds to at least one epitope on gp160. In some aspects, VL4 specifically binds to at least one epitope on gp120. In some aspects, VL4 specifically binds to at least one epitope on gp41. In some aspects, VL4 specifically binds to at least one epitope on p17. In some aspects, VL4 specifically binds to at least one epitope on p24. In some aspects, VL4 specifically binds to at least one epitope on p7. In some aspects, VL4 specifically binds to at least one epitope on p55. In some aspects, VL4 specifically binds to at least one epitope on p66. In some aspects, VL4 specifically binds to at least one epitope on p31. In some aspects, VL4 specifically binds to at least one epitope on Nef. In some aspects, VL4 specifically binds to at least one epitope on Tat. In some aspects, VL4 specifically binds to at least one epitope on Rev. In some aspects, VL4 specifically binds to at least one epitope on Vif. In some aspects, VL4 specifically binds to at least one epitope on Vpr. In some aspects, VL4 specifically binds to at least one epitope on Vpu.

[0274] In some aspects of an antigen binding polypeptide or antigen binding polypeptide complex provided herein, VH1 is a first immunoglobulin heavy chain variable region that specifically binds to at least one epitope on at least one antigen selected from the group consisting of Env, gp160, gp120, gp41, p17, p24, p7, p55, p66, p31, Nef, Tat, Rev, Vif, Vpr and Vpu; VH2 is a second immunoglobulin heavy chain variable region that specifically binds to at least one epitope on at least one antigen selected from the group consisting of Env, gp160, gp120, gp41, p17, p24, p7, p55, p66, p31, Nef, Tat, Rev, Vif, Vpr and Vpu; VH3 is a third immunoglobulin heavy chain variable region that specifically binds to at least one epitope on at least one antigen selected from the group consisting of Env, gp160, gp120, gp41, p17, p24, p7, p55, p66, p31, Nef, Tat, Rev, Vif, Vpr and Vpu; VH4 is a fourth immunoglobulin heavy chain variable region that specifically binds to at least one epitope on at least one antigen selected from the group consisting of Env, gp160, gp120, gp41, p17, p24, p7, p55, p66, p31, Nef, Tat, Rev, Vif, Vpr and Vpu; VL1 is a first immunoglobulin light chain variable region that specifically binds to at least one epitope on at least one antigen selected from the group consisting of Env, gp160, gp120, gp41, p17, p24, p7, p55, p66, p31, Nef, Tat, Rev, Vif, Vpr and Vpu; VL2 is a second immunoglobulin light chain variable region that specifically binds to at least one epitope on at least one antigen selected from the group consisting of Env, gp160, gp120, gp41, p17, p24, p7, p55, p66, p31, Nef, Tat, Rev, Vif, Vpr and Vpu; VL3 is a third immunoglobulin light chain variable region that specifically binds to at least one epitope on at least one antigen selected from the group consisting of Env, gp160, gp120, gp41, p17, p24, p7, p55, p66, p31, Nef, Tat, Rev, Vif, Vpr and Vpu; and VL4 is a fourth immunoglobulin light chain variable region that specifically binds to at least one epitope on at least one antigen selected from the group consisting of Env, gp160, gp120, gp41, p17, p24, p7, p55, p66, p31, Nef, Tat, Rev, Vif, Vpr and Vpu.

[0275] In some aspects, an antigen binding polypeptide provided has a structure represented by VL1-VL2-VH2-VH1; VH1-VH2-VL2-VL1; VL1-L1-VL2-L2-VH2-L3-VH1; or VH1-L1-VH2-L2-VL2-L3-VL1; wherein VL1 is a first immunoglobulin light chain variable region that specifically binds to at least one epitope on at least one antigen selected from the group consisting of Env, gp160, gp120, gp41, p17, p24, p7, p55, p66, p31, Nef, Tat, Rev, Vif, Vpr and Vpu; VL2 is a second immunoglobulin light chain variable region that specifically binds to at least one epitope on at least one antigen selected from the group consisting of Env, gp160, gp120, gp41, p17, p24, p7, p55, p66, p31, Nef, Tat, Rev, Vif, Vpr and Vpu; VH1 is a first immunoglobulin heavy chain variable region that specifically binds to at least one epitope on at least one antigen selected from the group consisting of Env, gp160, gp120, gp41, p17, p24, p7, p55, p66, p31, Nef, Tat, Rev, Vif, Vpr and Vpu; VH2 is a second immunoglobulin heavy chain variable region that specifically binds to at least one epitope on at least one antigen selected from the group consisting of Env, gp160, gp120, gp41, p17, p24, p7, p55, p66, p31, Nef, Tat, Rev, Vif, Vpr and Vpu; L1, L2 and L3 are amino acid linkers; wherein said antigen binding polypeptide further comprises at least one of the following (i)-(xxi): (i) an Fc region having an optional immunoglobulin hinge, wherein the immunoglobulin hinge comprises an upper hinge region, a middle hinge region, a lower hinge region, or a combination thereof; (ii) a linker selected from the group consisting of L1, L2 or L3 having a length of from about 1 amino acid to about 50 amino acids; (iii) a linker selected from the group consisting of L1, L2 or L3 selected from the group consisting of SEQ ID NO: 1, SEQ ID NO: 2, SEQ ID NO: 3, SEQ ID NO: 4, SEQ ID NO: 5, SEQ ID NO: 6, SEQ ID NO: 7, SEQ ID NO: 8, SEQ ID NO: 9, SEQ ID NO: 10, SEQ ID NO: 11, SEQ ID NO: 12, SEQ ID NO: 13, SEQ ID NO: 14, SEQ ID NO: 15, SEQ ID NO: 16, SEQ ID NO: 17, SEQ ID NO: 18, SEQ ID NO: 19, SEQ ID NO: 681, SEQ ID NO: 682, SEQ ID NO: 683, SEQ ID NO: 684, SEQ ID NO: 685, SEQ ID NO: 686, SEQ ID NO: 687, or SEQ ID NO: 688, or a sequence having at least 50%, at least 60%, at least 70%, at least 80%, at least 90%, or at least 95% identity to any one of SEQ ID NOs:1-19 and 681-688; (iv) a linker selected from L1, L2 or L3 which is non-immunogenic; (v) a linker selected from L1, L2 or L3 wherein said linker does not contain a consensus T cell epitope; (vi) an Fc region comprising at least one knob-into-hole modification; (vii) a detectable label; (viii) a detectable label selected from the group consisting of a radioactive label, chemiluminescent label, fluorescent label, enzyme, or peptide tag, or a combination thereof; (ix) a peptide tag; (x) a peptide tag selected from a polyhistidine tag consisting of from about 4 to about 10 histidine residues; (xi) a peptide tag having about 8 histidine residues; (xii) the polypeptide is conjugated to an agent to form an antibody-agent conjugate; (xiii) an antibody-agent conjugate wherein the agent is selected from the group consisting of a cytotoxic agent, an immunomodulating agent, an imaging agent, a therapeutic protein, or a combination thereof; (xiv) an antigen binding polypeptide having an equilibrium dissociation constant (KD) of from about 10 μM to about 1 pM when bound to an epitope on a target antigen or when complexed with another antigen binding polypeptide to form an antigen binding polypeptide complex having at least two antigen binding polypeptides; (xv) an antibody or antigen binding fragment thereof; (xvi) an antibody or antigen binding fragment thereof selected from the group consisting of IgG, IgM, IgE, IgA or IgD; (xvii) an antibody or antigen binding fragment thereof selected from an IgG antibody selected from the group consisting of IgG1, IgG2, IgG3 or IgG4; (xviii) an antibody or antigen binding fragment selected from the group consisting of Fab, scFab, Fab′, F(ab′)₂, Fv or scFv; (xix) an antigen binding polypeptide having an effector function mutation; (xx) an antigen bind polypeptide which, when formed into an antigen binding polypeptide complex, is an IgG1 or IgG4 antibody and the knob-into-hole modification comprises: (i) knob substitutions of S354C and T366W and hole substitutions of Y349C, T366S, L368A and Y407V; (ii) hole substitutions of L234A, L235A and P239A; (iii) hole substitutions of L234A and L235A; (iv) hole substitutions of M428L and N433S; (v) hole substitutions of M252Y, S254T and T256E; or (vi) a combination thereof, based on the EU numbering scheme; and (xxi) an antigen binding polypeptide as part of a chimeric receptor antigen.

[0276] In some aspects, an antigen binding polypeptide complex provided herein comprises a first polypeptide and a second polypeptide; wherein the first polypeptide has a structure represented by VL1-VL-VH2-VH1; VH1-VH2-VL2-VL1; VL1-L1-VL2-L2-VH2-L3-VH1; or VH1-L1-VH2-L2-VL2-L3-VL1; wherein the second polypeptide has a structure represented by VL1-VL2-VH2-VH1; VH1-VH2-VL2-VL1; VL1-L1-VL2-L2-VH2-L3-VH1; or VH1-L1-VH2-L2-VL2-L3-VL1; wherein VL1 is a first immunoglobulin light chain variable region that specifically binds to at least one epitope on at least one antigen selected from the group consisting of Env, gp160, gp120, gp41, p17, p24, p7, p55, p66, p31, Nef, Tat, Rev, Vif, Vpr and Vpu; VL2 is a second immunoglobulin light chain variable region that specifically binds to at least one epitope on at least one antigen selected from the group consisting of Env, gp160, gp120, gp41, p17, p24, p7, p55, p66, p31, Nef, Tat, Rev, Vif, Vpr and Vpu; VH1 is a first immunoglobulin heavy chain variable region that specifically binds to at least one epitope on at least one antigen selected from the group consisting of Env, gp160, gp120, gp41, p17, p24, p7, p55, p66, p31, Nef, Tat, Rev, Vif, Vpr and Vpu; VH2 is a second immunoglobulin heavy chain variable region that specifically binds to at least one epitope on at least one antigen selected from the group consisting of Env, gp160, gp120, gp41, p17, p24, p7, p55, p66, p31, Nef, Tat, Rev, Vif, Vpr and Vpu; L1, L2 and L3 are amino acid linkers; wherein said antigen binding polypeptide complex further comprises at least one of the following (i)-(xxi): (i) an Fc region having an optional immunoglobulin hinge, wherein the immunoglobulin hinge comprises an upper hinge region, a middle hinge region, a lower hinge region, or a combination thereof; (ii) a linker selected from the group consisting of L1, L2 or L3 having a length of from about 1 amino acid to about 50 amino acids; (iii) a linker selected from the group consisting of L1, L2 or L3 selected from the group consisting of SEQ ID NO: 1, SEQ ID NO: 2, SEQ ID NO: 3, SEQ ID NO: 4, SEQ ID NO: 5, SEQ ID NO: 6, SEQ ID NO: 7, SEQ ID NO: 8, SEQ ID NO: 9, SEQ ID NO: 10, SEQ ID NO: 11, SEQ ID NO: 12, SEQ ID NO: 13, SEQ ID NO: 14, SEQ ID NO: 15, SEQ ID NO: 16, SEQ ID NO: 17, SEQ ID NO: 18, SEQ ID NO: 19, SEQ ID NO: 681, SEQ ID NO: 682, SEQ ID NO: 683, SEQ ID NO: 684, SEQ ID NO: 685, SEQ ID NO: 686, SEQ ID NO: 687, or SEQ ID NO: 688, or a sequence having at least 50%, at least 60%, at least 70%, at least 80%, at least 90%, or at least 95% identity to any one of SEQ ID NOs:1-19 or 681-688; (iv) a linker selected from L1, L2 or L3 which is non-immunogenic; (v) a linker selected from L1, L2 or L3 wherein said linker does not contain a consensus T cell epitope; (vi) an Fc region comprising at least one knob-into-hole modification; (vii) a detectable label; (viii) a detectable label selected from the group consisting of a radioactive label, chemiluminescent label, fluorescent label, enzyme, or peptide tag, or a combination thereof; (ix) a peptide tag; (x) a peptide tag selected from a polyhistidine tag consisting of from about 4 to about 10 histidine residues; (xi) a peptide tag having about 8 histidine residues; (xii) the polypeptide is conjugated to an agent to form an antibody-agent conjugate; (xiii) an antibody-agent conjugate wherein the agent is selected from the group consisting of a cytotoxic agent, an immunomodulating agent, an imaging agent, a therapeutic protein, or a combination thereof; (xiv) an antigen binding polypeptide having an equilibrium dissociation constant (KD) of from about 10 μM to about 1 pM when bound to an epitope on a target antigen or when complexed with another antigen binding polypeptide to form an antigen binding polypeptide complex having at least two antigen binding polypeptides; (xv) an antibody or antigen binding fragment thereof; (xvi) an antibody or antigen binding fragment thereof selected from the group consisting of IgG, IgM, IgE, IgA or IgD; (xvii) an antibody or antigen binding fragment thereof selected from an IgG antibody selected from the group consisting of IgG1, IgG2, IgG3 or IgG4; (xviii) an antibody or antigen binding fragment selected from the group consisting of Fab, scFab, Fab′, F(ab′)₂, Fv or scFv; (xix) an antigen binding polypeptide having an effector function mutation; (xx) an antigen binding polypeptide which, when formed into an antigen binding polypeptide complex, is an IgG1 or IgG4 antibody and the knob-into-hole modification comprises (i) knob substitutions of S354C and T366W and hole substitutions of Y349C, T366S, L368A and Y407V; (ii) hole substitutions of L234A, L235A and P239A; (iii) hole substitutions of L234A and L235A; (iv) hole substitutions of M428L and N433S; (v) hole substitutions of M252Y, S254T and T256E; or (vi) a combination thereof, based on the EU numbering scheme; and (xxi) an antigen binding polypeptide as part of a chimeric receptor antigen.

[0277] In some aspects, an antigen binding polypeptide of the invention has a structure represented by VL1-VL2-VH2-VH1; VH1-VH2-VL2-VL1; VL1-L1-VL2-L2-VH2-L3-VH1; or VH1-L1-VH2-L2-VL2-L3-VL1; wherein VL1 is a first immunoglobulin light chain variable region that specifically binds to an HIV protein; VL2 is a second immunoglobulin light chain variable region that specifically binds to an HIV protein; VH1 is a first immunoglobulin heavy chain variable region that specifically binds to an HIV protein; VH2 is a second immunoglobulin heavy chain variable region that specifically binds to an HIV protein; and L1, L2 and L3 are amino acid linkers.

[0278] In some aspects, an antigen binding polypeptide complex of the invention comprises a first polypeptide and a second polypeptide; wherein the first polypeptide has a structure represented by VL1-VL2-VH2-VH1; VH1-VH2-VL2-VL1; VL1-L1-VL2-L2-VH2-L3-VH1; or VH1-L1-VH2-L2-VL2-L3-VL1; wherein the second polypeptide has a structure represented by VL1-VL2-VH2-VH1; VH1-VH2-VL2-VL1; VL1-L1-VL2-L2-VH2-L3-VH1; or VH1-L1-VH2-L2-VL2-L3-VL1; wherein VL1 is a first immunoglobulin light chain variable region that specifically binds to an HIV protein; VL2 is a second immunoglobulin light chain variable region that specifically binds to an HIV protein; VH1 is a first immunoglobulin heavy chain variable region that specifically binds to an HIV protein; VH2 is a second immunoglobulin heavy chain variable region that specifically binds to an HIV protein; and L1, L2 and L3 are amino acid linkers. In some aspects, the first polypeptide has a structure represented by VL1-VL2-VH2-VH1 and the second polypeptide has a structure represented by VL1-VL2-VH2-VH1; VH1-VH2-VL2-VL1; VL1-L1-VL2-L2-VH2-L3-VH1; or VH1-L1-VH2-L2-VL2-L3-VL1. In some aspects, the first polypeptide has a structure represented by VH1-VH2-VL2-VL1 and the second polypeptide has a structure represented by VL1-VL2-VH2-VH1; VH1-VH2-VL2-VL1; VL1-L1-VL2-L2-VH2-L3-VH1; or VH1-L1-VH2-L2-VL2-L3-VL1. In some aspects, the first polypeptide has a structure represented by VL1-L1-VL2-L2-VH2-L3-VH1 and the second polypeptide has a structure represented by VL1-VL2-VH2-VH1; VH1-VH2-VL2-VL1; VL1-L1-VL2-L2-VH2-L3-VH1; or VH1-L1-VH2-L2-VL2-L3-VL1. In some aspects, the first polypeptide has a structure represented by VH1-L1-VH2-L2-VL2-L3-VL1 and the second polypeptide has a structure represented by VL1-VL2-VH2-VH1; VH1-VH2-VL2-VL1; VL1-L1-VL2-L2-VH2-L3-VH1; or VH1-L1-VH2-L2-VL2-L3-VL1.

[0279] In some aspects, an antigen binding polypeptide of the invention has a structure represented by VL1-VL2-VH2-VH1-Fc; VH1-VH2-VL2-VL1-Fc; VL1-L1-VL2-L2-VH2-L3-VH1-Fc; VH1-L1-VH2-L2-VL2-L3-VL1-Fc; VL1-L1-VL2-L2-VH2-L3-VH1-L4-Fe; or VH1-L1-VH2-L2-VL2-L3-VL1-L4-Fe; wherein VL1 is a first immunoglobulin light chain variable region that specifically binds to an HIV protein; VL2 is a second immunoglobulin light chain variable region that specifically binds to an HIV protein; VH1 is a first immunoglobulin heavy chain variable region that specifically binds to an HIV protein; VH2 is a second immunoglobulin heavy chain variable region that specifically binds to an HIV protein; Fc is a region comprising an immunoglobulin heavy chain constant region 2 (CH2), an immunoglobulin heavy chain constant region 3 (CH3), and optionally, an immunoglobulin hinge; and L1, L2, L3 and L4 are amino acid linkers.

[0280] In some aspects, an antigen binding polypeptide complex of the invention comprises a first polypeptide and a second polypeptide; wherein the first polypeptide has a structure represented by VL1-VL2-VH2-VH1-Fc; VH1-VH2-VL2-VL1-Fe; VL1-L1-VL2-L2-VH2-L3-VH1-Fe; VH1-L1-VH2-L2-VL2-L3-VL1-Fc; VL1-L1-VL2-L2-VH2-L3-VH1-L4-Fe; or VH1-L1-VH2-L2-VL2-L3-VL1-L4-Fe; wherein the second polypeptide has a structure represented by Fc; VL1-VL2-VH2-VH1-Fc; VH1-VH2-VL2-VL1-Fc; VL1-L1-VL2-L2-VH2-L3-VH1-Fc; VH1-L1-VH2-L2-VL2-L3-VL1-Fe; VL1-L1-VL2-L2-VH2-L3-VH1-L4-Fe; or VH1-L1-VH2-L2-VL2-L3-VL1-L4-Fe; wherein VL1 is a first immunoglobulin light chain variable region that specifically binds to an HIV protein; VL2 is a second immunoglobulin light chain variable region that specifically binds to an HIV protein; VH1 is a first immunoglobulin heavy chain variable region that specifically binds to an HIV protein; VH2 is a second immunoglobulin heavy chain variable region that specifically binds to an HIV protein; Fc is a region comprising an immunoglobulin heavy chain constant region 2 (CH2), an immunoglobulin heavy chain constant region 3 (CH3), and optionally, an immunoglobulin hinge; and L1, L2, L3 and L4 are amino acid linkers. In some aspects, the first polypeptide has a structure represented by VL1-VL2-VH2-VH1-Fc and the second polypeptide has a structure represented by Fc; VL1-VL2-VH2-VH1-Fc; VH1-VH2-VL2-VL1-Fc; VL1-L1-VL2-L2-VH2-L3-VH1-Fe; VH1-L1-VH2-L2-VL2-L3-VL1-Fe; VL1-L1-VL2-L2-VH2-L3-VH1-L4-Fe; or VH1-L1-VH2-L2-VL2-L3-VL1-L4-Fe. In some aspects, the first polypeptide has a structure represented by VH1-VH2-VL2-VL1-Fc and the second polypeptide has a structure represented by Fc; VL1-VL2-VH2-VH1-Fc; VH1-VH2-VL2-VL1-Fe; VL1-L1-VL2-L2-VH2-L3-VH1-Fe; VH1-L1-VH2-L2-VL2-L3-VL1-Fc; VL1-L1-VL2-L2-VH2-L3-VH1-L4-Fc; or VH1-L1-VH2-L2-VL2-L3-VL1-L4-Fe. In some aspects, the first polypeptide has a structure represented by VL1-L1-VL2-L2-VH2-L3-VH1-Fc and the second polypeptide has a structure represented by Fc; VL1-VL2-VH2-VH1-Fc; VH1-VH2-VL2-VL1-Fe; VL1-L1-VL2-L2-VH2-L3-VH1-Fe; VH1-L1-VH2-L2-VL2-L3-VL1-Fc; VL1-L1-VL2-L2-VH2-L3-VH1-L4-Fc; or VH1-L1-VH2-L2-VL2-L3-VL1-L4-Fe. In some aspects, the first polypeptide has a structure represented by VH1-L1-VH2-L2-VL2-L3-VL1-Fc and the second polypeptide has a structure represented by Fc; VL1-VL2-VH2-VH1-Fc; VH1-VH2-VL2-VL1-Fc; VL1-L1-VL2-L2-VH2-L3-VH1-Fc; VH1-L1-VH2-L2-VL2-L3-VL1-Fc; VL1-L1-VL2-L2-VH2-L3-VH1-L4-Fe; or VH1-L1-VH2-L2-VL2-L3-VL1-L4-Fe. In some aspects, the first polypeptide has a structure represented by VL1-L1-VL2-L2-VH2-L3-VH1-L4-Fc and the second polypeptide has a structure represented by Fc; VL1-VL2-VH2-VH1-Fc; VH1-VH2-VL2-VL1-Fc; VL1-L1-VL2-L2-VH2-L3-VH1-F c; VH1-L1-VH2-L2-VL2-L3-VL1-Fc; VL1-L1-VL2-L2-VH2-L3-VH1-L4-Fc; or VH1-L1-VH2-L2-VL2-L3-VL1-L4-Fc. In some aspects, the first polypeptide has a structure represented by VH1-L1-VH2-L2-VL2-L3-VL1-L4-Fc and the second polypeptide has a structure represented by Fc; VL1-VL2-VH2-VH1-Fc; VH1-VH2-VL2-VL1-Fe; VL1-L1-VL2-L2-VH2-L3-VH1-Fc; VH1-L1-VH2-L2-VL2-L3-VL1-Fc; VL1-L1-VL2-L2-VH2-L3-VH1-L4-Fc; or VH1-L1-VH2-L2-VL2-L3-VL1-L4-Fe.

[0281] In some aspects, an antigen binding polypeptide of the invention has a structure represented by VL1-VL2-VH2-VH1-CH1-CL; VH1-VH2-VL2-VL1-CH1-CL; VL1-VL2-VH2-VH1-CL-CH1; VH1-VH2-VL2-VL1-CL-CH1; VL1-L1-VL2-L2-VH2-L3-VH1-L4-CH1-L5-CL; VH1-L1-VH2-L2-VL2-L3-VL1-L4-CH1-L5-CL; VL1-L1-VL2-L2-VH2-L3-VH1-L4-CL-L5-CH1; or VH1-L1-VH2-L2-VL2-L3-VL1-L4-CL-L5-CH1; wherein VL1 is a first immunoglobulin light chain variable region that specifically binds to an HIV protein; VL2 is a second immunoglobulin light chain variable region that specifically binds to an HIV protein; VH1 is a first immunoglobulin heavy chain variable region that specifically binds to an HIV protein; VH2 is a second immunoglobulin heavy chain variable region that specifically binds to an HIV protein; CH1 is an immunoglobulin heavy chain constant region 1; CL is an immunoglobulin light chain constant region; and L1, L2, L3, L4 and L5 are amino acid linkers.

[0282] In some aspects, an antigen binding polypeptide complex of the invention comprises a first polypeptide and a second polypeptide; wherein the first polypeptide has a structure represented by VL1-VL2-VH2-VH1-CH1; VH1-VH2-VL2-VL1-CH1; VL1-VL2-VH2-VH1-CL; VH1-VH2-VL2-VL1-CL; VL1-VL2-VH2-VH1-CH1-CL; VH1-VH2-VL2-VL1-CH1-CL; VL1-VL2-VH2-VH1-CL-CH1; VH1-VH2-VL2-VL1-CL-CH1; VL1-L1-VL2-L2-VH2-L3-VH1-L4-CH1; VH1-L1-VH2-L2-VL2-L3-VL1-L4-CH1; VL1-L1-VL2-L2-VH2-L3-VH1-L4-CL; VH1-L1-VH2-L2- VL2-L3-VL1-L4-CL; VL1-L1-VL2-L2-VH2-L3-VH1-L4-CH1-L5-CL; VH1-L1-VH2-L2-VL2-L3-VL1-L4-CH1-L5-CL; VL1-L1-VL2-L2-VH2-L3-VH1-L4-CL-L5-CH1; or VH1-L1-VH2-L2-VL2-L3-VL1-L4-CL-L5-CH1; wherein the second polypeptide has a structure represented by VL1-VL2-VH2-VH1-CH1; VL1-VL2-VH2-VH1-CH1; VH1-VH2-VL2-VL1-CH1; VL1-VL2-VH2-VH1-CL; VH1-VH2-VL2-VL1-CL; VL1-VL2-VH2-VH1-CH1-CL; VH1-VH2-VL2-VL1-CH1-CL; VL1-VL2-VH2-VH1-CL-CH1; VH1-VH2-VL2-VL1-CL-CH1; VL1-L1-VL2-L2-VH2-L3-VH1-L4-CH1; VH1-L1-VH2-L2-VL2-L3-VL1-L4-CH1; VL1-L1-VL2-L2-VH2-L3-VH1-L4-CL; VH1-L1-VH2-L2-VL2-L3-VL1-L4-CL; VL1-L1-VL2-L2-VH2-L3-VH1-L4-CH1-L5-CL; VH1-L1-VH2-L2-VL2-L3-VL1-L4-CH1-L5-CL; VL1-L1-VL2-L2- VH2-L3-VH1-L4-CL-L5-CH1; or VH1-L1-VH2-L2-VL2-L3-VL1-L4-CL-L5-CH1; wherein VL1 is a first immunoglobulin light chain variable region that specifically binds to an HIV protein; VL2 is a second immunoglobulin light chain variable region that specifically binds to an HIV protein; VH1 is a first immunoglobulin heavy chain variable region that specifically binds to an HIV protein; VH2 is a second immunoglobulin heavy chain variable region that specifically binds to an HIV protein; CH1 is an immunoglobulin heavy chain constant region 1; CL is an immunoglobulin light chain constant region; and L1, L2, L3, L4 and L5 are amino acid linkers. In some aspects, the first polypeptide has a structure represented by VL1-VL2-VH2-VH1-CH1 and the second polypeptide has a structure represented by VL1-VL2-VH2-VH1-CH1; VL1-VL2-VH2-VH1-CH1; VH1-VH2-VL2-VL1-CH1; VL1-VL2-VH2-VH1-CL; VH1-VH2-VL2-VL1-CL; VL1-VL2-VH2-VH1-CH1-CL; VH1-VH2-VL2-VL1-CH1-CL; VL1-VL2-VH2-VH1-CL-CH1; VH1-VH2-VL2-VL1-CL-CH1; VL1-L1-VL2-L2-VH2-L3-VH1-L4-CH1; VH1-L1-VH2-L2-VL2-L3-VL1-L4-CH1; VL1-L1-VL2-L2- VH2-L3-VH1-L4-CL; VH1-L1-VH2-L2-VL2-L3-VL1-L4-CL; VL1-L1-VL2-L2-VH2-L3-VH1-L4-CH1-L5-CL; VH1-L1-VH2-L2-VL2-L3-VL1-L4-CH1-L5-CL; VL1-L1-VL2-L2-VH2-L3-VH1-L4-CL-L5-CH1; or VH1-L1-VH2-L2-VL2-L3-VL1-L4-CL-L5-CH1. In some aspects, the first polypeptide has a structure represented by VH1-VH2-VL2-VL1-CH1 and the second polypeptide has a structure represented by VL1-VL2-VH2-VH1-CH1; VL1-VL2-VH2-VH1-CH1; VH1-VH2-VL2-VL1-CH1; VL1-VL2-VH2-VH1-CL; VH1-VH2-VL2-VL1-CL; VL1-VL2-VH2-VH1-CH1-CL; VH1-VH2-VL2-VL1-CH1-CL; VL1-VL2-VH2-VH1-CL-CH1; VH1-VH2-VL2-VL1-CL-CH1; VL1-L1-VL2-L2-VH2-L3-VH1-L4-CH1; VH1-L1-VH2-L2-VL2-L3-VL1-L4-CH1; VL1-L1-VL2-L2-VH2-L3-VH1-L4-CL; VH1-L1-VH2-L2- VL2-L3-VL1-L4-CL; VL1-L1-VL2-L2-VH2-L3-VH1-L4-CH1-L5-CL; VH1-L1-VH2-L2-VL2-L3-VL1-L4-CH1-L5-CL; VL1-L1-VL2-L2-VH2-L3-VH1-L4-CL-L5-CH1; or VH1-L1-VH2-L2-VL2-L3-VL1-L4-CL-L5-CH1. In some aspects, the first polypeptide has a structure represented by VL1-VL2-VH2-VH1-CL and the second polypeptide has a structure represented by VL1-VL2-VH2-VH1-CH1; VL1-VL2-VH2-VH1-CH1; VH1-VH2-VL2-VL1-CH1; VL1-VL2-VH2-VH1-CL; VH1-VH2-VL2-VL1-CL; VL1-VL2-VH2-VH1-CH1-CL; VH1-VH2-VL2-VL1-CH1-CL; VL1-VL2-VH2-VH1-CL-CH1; VH1-VH2-VL2-VL1-CL-CH1; VL1-L1-VL2-L2-VH2-L3-VH1-L4-CH1; VH1-L1-VH2-L2-VL2-L3-VL1-L4-CH1; VL1-L1-VL2-L2-VH2-L3-VH1-L4-CL; VH1-L1-VH2-L2-VL2-L3-VL1-L4-CL; VL1-L1-VL2-L2- VH2-L3-VH1-L4-CH1-L5-CL; VH1-L1-VH2-L2-VL2-L3-VL1-L4-CH1-L5-CL; VL1-L1-VL2-L2-VH2-L3-VH1-L4- CL-L5-CH1; or VH1-L1-VH2-L2-VL2-L3-VL1-L4-CL-L5-CH1. In some aspects, the first polypeptide has a structure represented by VH1-VH2-VL2-VL1-CL and the second polypeptide has a structure represented by VL1-VL2-VH2-VH1-CH1; VL1-VL2-VH2-VH1-CH1; VH1-VH2-VL2-VL1-CH1; VL1-VL2-VH2-VH1-CL; VH1-VH2-VL2-VL1-CL; VL1-VL2-VH2-VH1-CH1-CL; VH1-VH2-VL2-VL1-CH1-CL; VL1-VL2-VH2-VH1-CL-CH1; VH1-VH2-VL2-VL1-CL-CH1; VL1-L1-VL2-L2-VH2-L3-VH1-L4-CH1; VH1-L1-VH2-L2-VL2-L3-VL1-L4-CH1; VL1-L1-VL2-L2- VH2-L3-VH1-L4-CL; VH1-L1-VH2-L2-VL2-L3-VL1-L4-CL; VL1-L1-VL2-L2-VH2-L3-VH1-L4-CH1-L5-CL; VH1-L1-VH2-L2-VL2-L3-VL1-L4-CH1-L5-CL; VL1-L1-VL2-L2-VH2-L3-VH1-L4-CL-L5-CH1; or VH1-L1-VH2-L2-VL2-L3-VL1-L4-CL-L5-CH1. In some aspects, the first polypeptide has a structure represented by VL1-VL2-VH2-VH1-CH1-CL and the second polypeptide has a structure represented by VL1-VL2-VH2-VH1-CH1; VL1-VL2-VH2-VH1-CH1; VH1-VH2-VL2-VL1-CH1; VL1-VL2-VH2-VH1-CL; VH1-VH2-VL2-VL1-CL; VL1-VL2-VH2-VH1-CH1-CL; VH1-VH2-VL2-VL1-CH1-CL; VL1-VL2-VH2-VH1-CL-CH1; VH1-VH2-VL2-VL1-CL-CH1; VL1-L1-VL2-L2-VH2-L3-VH1-L4-CH1; VH1-L1-VH2-L2-VL2-L3-VL1-L4-CH1; VL1-L1-VL2-L2-VH2-L3-VH1-L4-CL; VH1-L1- VH2-L2-VL2-L3-VL1-L4-CL; VL1-L1-VL2-L2-VH2-L3-VH1-L4-CH1-L5-CL; VH1-L1-VH2-L2-VL2-L3-VL1-L4-CH1- L5-CL; VL1-L1-VL2-L2-VH2-L3-VH1-L4-CL-L5-CH1; or VH1-L1-VH2-L2-VL2-L3-VL1-L4-CL-L5-CH1. In some aspects, the first polypeptide has a structure represented by VH1-VH2-VL2-VL1-CH1-CL and the second polypeptide has a structure represented by VL1-VL2-VH2-VH1-CH1; VL1-VL2-VH2-VH1-CH1; VH1-VH2-VL2-VL1-CH1; VL1-VL2-VH2-VH1-CL; VH1-VH2-VL2-VL1-CL; VL1-VL2-VH2-VH1-CH1-CL; VH1-VH2-VL2-VL1-CH1-CL; VL1-VL2-VH2-VH1-CL-CH1; VH1-VH2-VL2-VL1-CL-CH1; VL1-L1-VL2-L2-VH2-L3-VH1-L4-CH1; VH1-L1-VH2-L2-VL2-L3-VL1-L4-CH1; VL1-L1-VL2-L2-VH2-L3-VH1-L4-CL; VH1-L1-VH2-L2-VL2-L3-VL1-L4-CL; VL1-L1- VL2-L2-VH2-L3-VH1-L4-CH1-L5-CL; VH1-L1-VH2-L2-VL2-L3-VL1-L4-CH1-L5-CL; VL1-L1-VL2-L2-VH2-L3- VH1-L4-CL-L5-CH1; or VH1-L1-VH2-L2-VL2-L3-VL1-L4-CL-L5-CH1. In some aspects, the first polypeptide has a structure represented by VL1-VL2-VH2-VH1-CL-CH1 and the second polypeptide has a structure represented by VL1-VL2-VH2-VH1-CH1; VL1-VL2-VH2-VH1-CH1; VH1-VH2-VL2-VL1-CH1; VL1-VL2-VH2-VH1-CL; VH1-VH2-VL2-VL1-CL; VL1-VL2-VH2-VH1-CH1-CL; VH1-VH2-VL2-VL1-CH1-CL; VL1-VL2-VH2-VH1-CL-CH1; VH1-VH2-VL2-VL1-CL-CH1; VL1-L1-VL2-L2-VH2-L3-VH1-L4-CH1; VH1-L1-VH2-L2-VL2-L3-VL1-L4-CH1; VL1- L1-VL2-L2-VH2-L3-VH1-L4-CL; VH1-L1-VH2-L2-VL2-L3-VL1-L4-CL; VL1-L1-VL2-L2-VH2-L3-VH1-L4-CH1- L5-CL; VH1-L1-VH2-L2-VL2-L3-VL1-L4-CH1-L5-CL; VL1-L1-VL2-L2-VH2-L3-VH1-L4-CL-L5-CH1; or VH1-L1-VH2-L2-VL2-L3-VL1-L4-CL-L5-CH1. In some aspects, the first polypeptide has a structure represented by VH1-VH2-VL2-VL1-CL-CH1 and the second polypeptide has a structure represented by VL1-VL2-VH2-VH1-CH1; VL1-VL2-VH2-VH1-CH1; VH1-VH2-VL2-VL1-CH1; VL1-VL2-VH2-VH1-CL; VH1-VH2-VL2-VL1-CL; VL1-VL2-VH2-VH1-CH1-CL; VH1-VH2-VL2-VL1-CH1-CL; VL1-VL2-VH2-VH1-CL-CH1; VH1-VH2-VL2-VL1-CL-CH1; VL1-L1-VL2-L2-VH2-L3-VH1-L4-CH1; VH1-L1-VH2-L2-VL2-L3-VL1-L4-CH1; VL1-L1-VL2-L2-VH2-L3-VH1-L4-CL; VH1-L1-VH2-L2-VL2-L3-VL1-L4-CL; VL1-L1-VL2-L2-VH2-L3-VH1-L4-CH1-L5-CL; VH1-L1-VH2-L2-VL2-L3-VL1- L4-CH1-L5-CL; VL1-L1-VL2-L2-VH2-L3-VH1-L4-CL-L5-CH1; or VH1-L1-VH2-L2-VL2-L3-VL1-L4-CL-L5-CH1. In some aspects, the first polypeptide has a structure represented by VL1-L1-VL2-L2-VH2-L3-VH1-L4-CH1 and the second polypeptide has a structure represented by VL1-VL2-VH2-VH1-CH1; VL1-VL2-VH2-VH1-CH1; VH1-VH2-VL2-VL1-CH1; VL1-VL2-VH2-VH1-CL; VH1-VH2-VL2-VL1-CL; VL1-VL2-VH2-VH1-CH1-CL; VH1-VH2-VL2-VL1-CH1-CL; VL1-VL2-VH2-VH1-CL-CH1; VH1-VH2-VL2-VL1-CL-CH1; VL1-L1-VL2-L2-VH2-L3-VH1-L4-CH1; VH1-L1-VH2-L2-VL2-L3-VL1-L4-CH1; VL1-L1-VL2-L2-VH2-L3-VH1-L4-CL; VH1-L1-VH2-L2-VL2- L3-VL1-L4-CL; VL1-L1-VL2-L2-VH2-L3-VH1-L4-CH1-L5-CL; VH1-L1-VH2-L2-VL2-L3-VL1-L4-CH1-L5-CL; VL1-L1-VL2-L2-VH2-L3-VH1-L4-CL-L5-CH1; or VH1-L1-VH2-L2-VL2-L3-VL1-L4-CL-L5-CH1. In some aspects, the first polypeptide has a structure represented by VH1-L1-VH2-L2-VL2-L3-VL1-L4-CH1 and the second polypeptide has a structure represented by VL1-VL2-VH2-VH1-CH1; VL1-VL2-VH2-VH1-CH1; VH1-VH2-VL2-VL1-CH1; VL1-VL2-VH2-VH1-CL; VH1-VH2-VL2-VL1-CL; VL1-VL2-VH2-VH1-CH1-CL; VH1-VH2-VL2-VL1-CH1-CL; VL1-VL2-VH2-VH1-CL-CH1; VH1-VH2-VL2-VL1-CL-CH1; VL1-L1-VL2-L2-VH2-L3-VH1-L4-CH1; VH1-L1-VH2-L2-VL2-L3-VL1-L4-CH1; VL1-L1-VL2-L2-VH2-L3-VH1-L4-CL; VH1-L1-VH2-L2-VL2-L3-VL1-L4-CL; VL1-L1- VL2-L2-VH2-L3-VH1-L4-CH1-L5-CL; VH1-L1-VH2-L2-VL2-L3-VL1-L4-CH1-L5-CL; VL1-L1-VL2-L2-VH2-L3- VH1-L4-CL-L5-CH1; or VH1-L1-VH2-L2-VL2-L3-VL1-L4-CL-L5-CH1. In some aspects, the first polypeptide has a structure represented by VL1-L1-VL2-L2-VH2-L3-VH1-L4-CL and the second polypeptide has a structure represented by VL1-VL2-VH2-VH1-CH1; VL1-VL2-VH2-VH1-CH1; VH1-VH2-VL2-VL1-CH1; VL1-VL2-VH2-VH1-CL; VH1-VH2-VL2-VL1-CL; VL1-VL2-VH2-VH1-CH1-CL; VH1-VH2-VL2-VL1-CH1-CL; VL1-VL2-VH2-VH1-CL-CH1; VH1-VH2-VL2-VL1-CL-CH1; VL1-L1-VL2-L2-VH2-L3-VH1-L4-CH1; VH1-L1-VH2-L2-VL2-L3-VL1-L4-CH1; VL1-L1-VL2-L2-VH2-L3-VH1-L4-CL; VH1-L1-VH2-L2-VL2-L3-VL1-L4-CL; VL1-L1-VL2-L2-VH2-L3-VH1- L4-CH1-L5-CL; VH1-L1-VH2-L2-VL2-L3-VL1-L4-CH1-L5-CL; VL1-L1-VL2-L2-VH2-L3-VH1-L4-CL-L5-CH1; or VH1-L1-VH2-L2-VL2-L3-VL1-L4-CL-L5-CH1. In some aspects, the first polypeptide has a structure represented by VH1-L1-VH2-L2-VL2-L3-VL1-L4-CL and the second polypeptide has a structure represented by VL1-VL2-VH2-VH1-CH1; VL1-VL2-VH2-VH1-CH1; VH1-VH2-VL2-VL1-CH1; VL1-VL2-VH2-VH1-CL; VH1-VH2-VL2-VL1-CL; VL1-VL2-VH2-VH1-CH1-CL; VH1-VH2-VL2-VL1-CH1-CL; VL1-VL2-VH2-VH1-CL-CH1; VH1-VH2-VL2-VL1-CL-CH1; VL1-L1-VL2-L2-VH2-L3-VH1-L4-CH1; VH1-L1-VH2-L2-VL2-L3-VL1-L4-CH1; VL1-L1-VL2-L2-VH2- L3-VH1-L4-CL; VH1-L1-VH2-L2-VL2-L3-VL1-L4-CL; VL1-L1-VL2-L2-VH2-L3-VH1-L4-CH1-L5-CL; VH1-L1-VH2-L2-VL2-L3-VL1-L4-CH1-L5-CL; VL1-L1-VL2-L2-VH2-L3-VH1-L4-CL-L5-CH1; or VH1-L1-VH2-L2-VL2-L3-VL1-L4-CL-L5-CH1. In some aspects, the first polypeptide has a structure represented by VL1-L1-VL2-L2-VH2-L3-VH1-L4-CH1-L5-CL and the second polypeptide has a structure represented by VL1-VL2-VH2-VH1-CH1; VL1-VL2-VH2-VH1-CH1; VH1-VH2-VL2-VL1-CH1; VL1-VL2-VH2-VH1-CL; VH1-VH2-VL2-VL1-CL; VL1-VL2-VH2-VH1-CH1-CL; VH1-VH2-VL2-VL1-CH1-CL; VL1-VL2-VH2-VH1-CL-CH1; VH1-VH2-VL2-VL1-CL-CH1; VL1-L1-VL2-L2-VH2-L3-VH1-L4-CH1; VH1-L1-VH2-L2-VL2-L3-VL1-L4-CH1; VL1-L1-VL2-L2-VH2-L3-VH1-L4-CL; VH1- L1-VH2-L2-VL2-L3-VL1-L4-CL; VL1-L1-VL2-L2-VH2-L3-VH1-L4-CH1-L5-CL; VH1-L1-VH2-L2-VL2-L3-VL1- L4-CH1-L5-CL; VL1-L1-VL2-L2-VH2-L3-VH1-L4-CL-L5-CH1; or VH1-L1-VH2-L2-VL2-L3-VL1-L4-CL-L5-CH1. In some aspects, the first polypeptide has a structure represented by VH1-L1-VH2-L2-VL2-L3-VL1-L4-CH1-L5-CL and the second polypeptide has a structure represented by VL1-VL2-VH2-VH1-CH1; VL1-VL2-VH2-VH1-CH1; VH1-VH2-VL2-VL1-CH1; VL1-VL2-VH2-VH1-CL; VH1-VH2-VL2-VL1-CL; VL1-VL2-VH2-VH1-CH1-CL; VH1-VH2-VL2-VL1-CH1-CL; VL1-VL2-VH2-VH1-CL-CH1; VH1-VH2-VL2-VL1-CL-CH1; VL1-L1-VL2-L2-VH2-L3-VH1-L4-CH1; VH1-L1-VH2-L2-VL2-L3-VL1-L4-CH1; VL1-L1-VL2-L2-VH2-L3-VH1-L4-CL; VH1-L1-VH2-L2- VL2-L3-VL1-L4-CL; VL1-L1-VL2-L2-VH2-L3-VH1-L4-CH1-L5-CL; VH1-L1-VH2-L2-VL2-L3-VL1-L4-CH1-L5-CL; VL1-L1-VL2-L2-VH2-L3-VH1-L4-CL-L5-CH1; or VH1-L1-VH2-L2-VL2-L3-VL1-L4-CL-L5-CH1. In some aspects, the first polypeptide has a structure represented by VL1-L1-VL2-L2-VH2-L3-VH1-L4-CL-L5-CH1 and the second polypeptide has a structure represented by VL1-VL2-VH2-VH1-CH1; VL1-VL2-VH2-VH1-CH1; VH1-VH2-VL2-VL1-CH1; VL1-VL2-VH2-VH1-CL; VH1-VH2-VL2-VL1-CL; VL1-VL2-VH2-VH1-CH1-CL; VH1-VH2-VL2-VL1-CH1-CL; VL1-VL2-VH2-VH1-CL-CH1; VH1-VH2-VL2-VL1-CL-CH1; VL1-L1-VL2-L2-VH2-L3-VH1-L4-CH1; VH1-L1-VH2-L2-VL2-L3-VL1-L4-CH1; VL1-L1-VL2-L2-VH2-L3-VH1-L4-CL; VH1-L1-VH2-L2-VL2-L3-VL1-L4-CL; VL1-L1-VL2-L2-VH2-L3-VH1-L4-CH1-L5-CL; VH1-L1-VH2-L2-VL2-L3-VL1-L4-CH1-L5-CL; VL1-L1-VL2-L2- VH2-L3-VH1-L4-CL-L5-CH1; or VH1-L1-VH2-L2-VL2-L3-VL1-L4-CL-L5-CH1. In some aspects, the first polypeptide has a structure represented by VH1-L1-VH2-L2-VL2-L3-VL1-L4-CL-L5-CH1 and the second polypeptide has a structure represented by VL1-VL2-VH2-VH1-CH1; VL1-VL2-VH2-VH1-CH1; VH1-VH2-VL2-VL1-CH1; VL1-VL2-VH2-VH1-CL; VH1-VH2-VL2-VL1-CL; VL1-VL2-VH2-VH1-CH1-CL; VH1-VH2-VL2-VL1-CH1-CL; VL1-VL2-VH2-VH1-CL-CH1; VH1-VH2-VL2-VL1-CL-CH1; VL1-L1-VL2-L2-VH2-L3-VH1-L4-CH1; VH1-L1-VH2-L2-VL2-L3-VL1-L4-CH1; VL1-L1-VL2-L2-VH2-L3-VH1-L4-CL; VH1-L1-VH2-L2-VL2-L3-VL1-L4-CL; VL1-L1-VL2-L2- VH2-L3-VH1-L4-CH1-L5-CL; VH1-L1-VH2-L2-VL2-L3-VL1-L4-CH1-L5-CL; VL1-L1-VL2-L2-VH2-L3-VH1-L4- CL-L5-CH1; or VH1-L1-VH2-L2-VL2-L3-VL1-L4-CL-L5-CH1.

[0283] In some aspects, an antigen binding polypeptide of the invention has a structure represented by VL1-VL2-VH2-VH1-CH1-CL-Fc; VH1-VH2-VL2-VL1-CH1-CL-Fc; VL1-VL2-VH2-VH1-CL-CH1-Fc; VH1-VH2-VL2-VL1-CL-CH1-Fc; VL1-L1-VL2-L2-VH2-L3-VH1-L4-CH1-L5-CL-Fc; VH1-L1-VH2-L2-VL2-L3-VL1-L4-CH1-L5-CL-Fc; VL1-L1-VL2-L2-VH2-L3-VH1-L4-CL-L5-CH1-Fc; VH1-L1-VH2-L2-VL2-L3-VL1-L4-CL-L5-CH1-Fc; VL1-L1-VL2-L2-VH2-L3-VH1-L4-CH1-L5-CL-L6-Fc; VH1-L1-VH2-L2-VL2-L3-VL1-L4-CH1-L5-CL-L6-Fc; VL1-L1-VL2-L2-VH2-L3-VH1-L4-CL-L5-CH1-L6-Fc; or VH1-L1-VH2-L2-VL2-L3-VL1-L4-CL-L5-CH1-L6-Fc; wherein VL1 is a first immunoglobulin light chain variable region that specifically binds to an HIV protein; VL2 is a second immunoglobulin light chain variable region that specifically binds to an HIV protein; VH1 is a first immunoglobulin heavy chain variable region that specifically binds to an HIV protein; VH2 is a second immunoglobulin heavy chain variable region that specifically binds to an HIV protein; CH1 is an immunoglobulin heavy chain constant region 1; CL is an immunoglobulin light chain constant region; Fc is a region comprising an immunoglobulin heavy chain constant region 2 (CH2), an immunoglobulin heavy chain constant region 3 (CH3), and optionally, an immunoglobulin hinge; and L1, L2, L3, L4, L5 and L6 are amino acid linkers.

[0284] In some aspects, an antigen binding polypeptide complex of the invention comprises a first polypeptide and a second polypeptide; wherein the first polypeptide has a structure represented by VL1-VL2-VH2-VH1-CH1-Fc; VH1-VH2-VL2-VL1-CH1-Fc; VL1-VL2-VH2-VH1-CL-Fc; VH1-VH2-VL2-VL1-CL-Fc; VL1-VL2-VH2-VH1-CH1-CL-Fc; VH1-VH2-VL2-VL1-CH1-CL-Fc; VL1-VL2-VH2-VH1-CL-CH1-Fc; VH1-VH2-VL2-VL1-CL-CH1-Fc; VL1-L1-VL2-L2-VH2-L3-VH1-L4-CH1-Fc; VH1-L1-VH2-L2-VL2-L3-VL1-L4-CH1-Fc; VL1-L1-VL2-L2-VH2-L3- VH1-L4-CL-Fc; VH1-L1-VH2-L2-VL2-L3-VL1-L4-CL-Fc; VL1-L1-VL2-L2-VH2-L3-VH1-L4-CH1-L5-CL-Fc; VH1-L1-VH2-L2-VL2-L3-VL1-L4-CH1-L5-CL-Fc; VL1-L1-VL2-L2-VH2-L3-VH1-L4-CL-L5-CH1-Fc; VH1-L1-VH2-L2-VL2-L3-VL1-L4-CL-L5-CH1-Fc; VL1-L1-VL2-L2-VH2-L3-VH1-L4-CH1-L5-Fc; VH1-L1-VH2-L2-VL2-L3-VL1-L4-CH1-L5-Fc; VL1-L1-VL2-L2-VH2-L3-VH1-L4-CL-L5-Fc; VH1-L1-VH2-L2-VL2-L3-VL1-L4-CL-L5-Fc; VL1-L1-VL2-L2-VH2-L3-VH1-L4-CH1-L5-CL-L6-Fc; VH1-L1-VH2-L2-VL2-L3-VL1-L4-CH1-L5-CL-L6-Fc; VL1-L1-VL2-L2-VH2-L3-VH1-L4-CL-L5-CH1-L6-Fc; or VH1-L1-VH2-L2-VL2-L3-VL1-L4-CL-L5-CH1-L6-Fc; wherein the second polypeptide has a structure represented by Fc; VL1-VL2-VH2-VH1-CH1-Fc; VH1-VH2-VL2-VL1-CH1-Fc; VL1-VL2-VH2-VH1-CL-Fc; VH1-VH2-VL2-VL1-CL-Fc; VL1-VL2-VH2-VH1-CH1-CL-Fc; VH1-VH2-VL2-VL1-CH1-CL-Fc; VL1-VL2-VH2-VH1-CL-CH1-Fc; VH1-VH2-VL2-VL1-CL-CH1-Fc; VL1-L1-VL2-L2-VH2-L3-VH1-L4-CH1-Fc; VH1-L1-VH2-L2-VL2-L3-VL1-L4-CH1-Fc; VL1-L1-VL2-L2-VH2-L3-VH1-L4-CL-Fc; VH1-L1-VH2-L2-VL2-L3-VL1-L4-CL-Fc; VL1-L1-VL2-L2-VH2-L3-VH1-L4-CH1-L5-CL-Fc; VH1-L1-VH2-L2-VL2-L3-VL1-L4-CH1-L5-CL-Fc; VL1-L1-VL2-L2-VH2-L3-VH1-L4-CL-L5-CH1-Fc; VH1-L1-VH2-L2-VL2-L3-VL1-L4-CL-L5-CH1-Fc; VL1-L1-VL2-L2-VH2-L3-VH1-L4-CH1-L5-Fc; VH1-L1-VH2-L2-VL2-L3-VL1-L4-CH1-L5-Fc; VL1-L1-VL2-L2-VH2-L3-VH1-L4-CL-L5-Fc; VH1-L1-VH2-L2-VL2-L3-VL1-L4-CL-L5-Fc; VL1-L1-VL2-L2-VH2-L3-VH1-L4-CH1-L5-CL-L6-Fc; VH1-L1-VH2-L2-VL2-L3-VL1-L4-CH1-L5-CL-L6-Fc; VL1-L1-VL2-L2-VH2-L3-VH1-L4-CL-L5-CH1-L6-Fc; or VH1-L1-VH2-L2-VL2-L3-VL1-L4-CL-L5-CH1-L6-Fc; wherein VL1 is a first immunoglobulin light chain variable region that specifically binds to an HIV protein; VL2 is a second immunoglobulin light chain variable region that specifically binds to an HIV protein; VH1 is a first immunoglobulin heavy chain variable region that specifically binds to an HIV protein; VH2 is a second immunoglobulin heavy chain variable region that specifically binds to an HIV protein; CH1 is an immunoglobulin heavy chain constant region 1; CL is an immunoglobulin light chain constant region; Fc is a region comprising an immunoglobulin heavy chain constant region 2 (CH2), an immunoglobulin heavy chain constant region 3 (CH3), and optionally, an immunoglobulin hinge; and L1, L2, L3, L4, L5 and L6 are amino acid linkers. In some aspects, the first polypeptide has a structure represented by VL1-VL2-VH2-VH1-CH1-Fc and the second polypeptide has a structure represented by Fc; VL1-VL2-VH2-VH1-CH1-Fc; VH1-VH2-VL2-VL1-CH1-Fc; VL1-VL2-VH2-VH1-CL-Fc; VH1-VH2-VL2-VL1-CL-Fc; VL1-VL2-VH2-VH1-CH1-CL-Fc; VH1-VH2-VL2-VL1-CH1-CL-Fc; VL1-VL2-VH2-VH1-CL-CH1-Fc; VH1-VH2-VL2-VL1-CL-CH1-Fc; VL1-L1-VL2-L2-VH2-L3-VH1-L4-CH1-Fc; VH1-L1-VH2-L2-VL2-L3-VL1-L4-CH1-Fc; VL1-L1-VL2-L2-VH2-L3-VH1-L4-CL-Fc; VH1-L1-VH2-L2-VL2-L3-VL1-L4-CL-Fc; VL1-L1-VL2-L2-VH2-L3-VH1-L4-CH1-L5-CL-Fc; VH1-L1-VH2-L2-VL2-L3-VL1-L4-CH1-L5-CL-Fc; VL1-L1-VL2-L2-VH2-L3-VH1-L4-CL-L5-CH1-Fc; VH1-L1-VH2-L2-VL2-L3-VL1-L4-CL- L5-CH1-Fc; VL1-L1-VL2-L2-VH2-L3-VH1-L4-CH1-L5-Fc; VH1-L1-VH2-L2-VL2-L3-VL1-L4-CH1-L5-Fc; VL1- L1-VL2-L2-VH2-L3-VH1-L4-CL-L5-Fc; VH1-L1-VH2-L2-VL2-L3-VL1-L4-CL-L5-Fc; VL1-L1-VL2-L2-VH2-L3-VH1-L4-CH1-L5-CL-L6-Fc; VH1-L1-VH2-L2-VL2-L3-VL1-L4-CH1-L5-CL-L6-Fc; VL1-L1-VL2-L2-VH2-L3-VH1-L4-CL-L5-CH1-L6-Fc; or VH1-L1-VH2-L2-VL2-L3-VL1-L4-CL-L5-CH1-L6-Fc. In some aspects, the first polypeptide has a structure represented by VH1-VH2-VL2-VL1-CH1-Fc and the second polypeptide has a structure represented by Fc; VL1-VL2-VH2-VH1-CH1-Fc; VH1-VH2-VL2-VL1-CH1-Fc; VL1-VL2-VH2-VH1-CL-Fc; VH1-VH2-VL2-VL1-CL-Fc; VL1-VL2-VH2-VH1-CH1-CL-Fc; VH1-VH2-VL2-VL1-CH1-CL-Fc; VL1-VL2-VH2-VH1-CL-CH1-Fc; VH1-VH2-VL2-VL1-CL-CH1-Fc; VL1-L1-VL2-L2-VH2-L3-VH1-L4-CH1-Fc; VH1-L1-VH2-L2-VL2-L3-VL1-L4-CH1-Fc; VL1-L1-VL2-L2-VH2-L3-VH1-L4-CL-Fc; VH1-L1-VH2-L2-VL2-L3-VL1-L4-CL-Fc; VL1-L1-VL2-L2-VH2-L3-VH1-L4-CH1-L5-CL-Fc; VH1-L1-VH2-L2-VL2-L3-VL1-L4-CH1-L5-CL-Fc; VL1-L1-VL2-L2-VH2-L3-VH1-L4-CL- L5-CH1-Fc; VH1-L1-VH2-L2-VL2-L3-VL1-L4-CL-L5-CH1-Fc; VL1-L1-VL2-L2-VH2-L3-VH1-L4-CH1-L5-Fc; VH1-L1-VH2-L2-VL2-L3-VL1-L4-CH1-L5-Fc; VL1-L1-VL2-L2-VH2-L3-VH1-L4-CL-L5-Fc; VH1-L1-VH2-L2-VL2-L3-VL1-L4-CL-L5-Fc; VL1-L1-VL2-L2-VH2-L3-VH1-L4-CH1-L5-CL-L6-Fc; VH1-L1-VH2-L2-VL2-L3-VL1-L4-CH1-L5-CL-L6-Fc; VL1-L1-VL2-L2-VH2-L3-VH1-L4-CL-L5-CH1-L6-Fc; or VH1-L1-VH2-L2-VL2-L3-VL1-L4-CL-L5-CH1-L6-Fc. In some aspects, the first polypeptide has a structure represented by VL1-VL2-VH2-VH1-CL-Fc and the second polypeptide has a structure represented by Fc; VL1-VL2-VH2-VH1-CH1-Fc; VH1-VH2-VL2-VL1-CH1-Fc; VL1-VL2-VH2-VH1-CL-Fc; VH1-VH2-VL2-VL1-CL-Fc; VL1-VL2-VH2-VH1-CH1-CL-Fc; VH1-VH2-VL2-VL1-CH1-CL-Fc; VL1-VL2-VH2-VH1-CL-CH1-Fc; VH1-VH2-VL2-VL1-CL-CH1-Fc; VL1-L1-VL2-L2-VH2-L3-VH1-L4-CH1-Fc; VH1-L1-VH2-L2-VL2-L3-VL1-L4-CH1-Fc; VL1-L1-VL2-L2-VH2-L3-VH1-L4-CL-Fc; VH1-L1-VH2-L2-VL2-L3-VL1-L4-CL-Fc; VL1-L1-VL2-L2-VH2-L3-VH1-L4-CH1-L5-CL-Fc; VH1-L1-VH2-L2-VL2-L3-VL1-L4-CH1-L5-CL-Fc; VL1-L1-VL2-L2-VH2-L3-VH1-L4-CL-L5-CH1-Fc; VH1-L1-VH2-L2-VL2-L3-VL1-L4-CL- L5-CH1-Fc; VL1-L1-VL2-L2-VH2-L3-VH1-L4-CH1-L5-Fc; VH1-L1-VH2-L2-VL2-L3-VL1-L4-CH1-L5-Fc; VL1- L1-VL2-L2-VH2-L3-VH1-L4-CL-L5-Fc; VH1-L1-VH2-L2-VL2-L3-VL1-L4-CL-L5-Fc; VL1-L1-VL2-L2-VH2-L3-VH1-L4-CH1-L5-CL-L6-Fc; VH1-L1-VH2-L2-VL2-L3-VL1-L4-CH1-L5-CL-L6-Fc; VL1-L1-VL2-L2-VH2-L3-VH1-L4-CL-L5-CH1-L6-Fc; or VH1-L1-VH2-L2-VL2-L3-VL1-L4-CL-L5-CH1-L6-Fc. In some aspects, the first polypeptide has a structure represented by VH1-VH2-VL2-VL1-CL-Fc and the second polypeptide has a structure represented by Fc; VL1-VL2-VH2-VH1-CH1-Fc; VH1-VH2-VL2-VL1-CH1-Fc; VL1-VL2-VH2-VH1-CL-Fc; VH1-VH2-VL2-VL1-CL-Fc; VL1-VL2-VH2-VH1-CH1-CL-Fc; VH1-VH2-VL2-VL1-CH1-CL-Fc; VL1-VL2-VH2-VH1-CL-CH1-Fc; VH1-VH2-VL2-VL1-CL-CH1-Fc; VL1-L1-VL2-L2-VH2-L3-VH1-L4-CH1-Fc; VH1-L1-VH2-L2-VL2-L3-VL1-L4-CH1-Fc; VL1-L1-VL2-L2-VH2-L3-VH1-L4-CL-Fc; VH1-L1-VH2-L2-VL2-L3-VL1-L4-CL-Fc; VL1-L1-VL2-L2-VH2-L3-VH1-L4-CH1-L5-CL-Fc; VH1-L1-VH2-L2-VL2-L3-VL1-L4-CH1-L5-CL-Fc; VL1-L1-VL2-L2-VH2-L3-VH1-L4-CL- L5-CH1-Fc; VH1-L1-VH2-L2-VL2-L3-VL1-L4-CL-L5-CH1-Fc; VL1-L1-VL2-L2-VH2-L3-VH1-L4-CH1-L5-Fc; VH1-L1-VH2-L2-VL2-L3-VL1-L4-CH1-L5-Fc; VL1-L1-VL2-L2-VH2-L3-VH1-L4-CL-L5-Fc; VH1-L1-VH2-L2-VL2-L3-VL1-L4-CL-L5-Fc; VL1-L1-VL2-L2-VH2-L3-VH1-L4-CH1-L5-CL-L6-Fc; VH1-L1-VH2-L2-VL2-L3-VL1-L4-CH1-L5-CL-L6-Fc; VL1-L1-VL2-L2-VH2-L3-VH1-L4-CL-L5-CH1-L6-Fc; or VH1-L1-VH2-L2-VL2-L3-VL1-L4-CL-L5-CH1-L6-Fc. In some aspects, the first polypeptide has a structure represented by VL1-VL2-VH2-VH1-CH1-CL-Fc and the second polypeptide has a structure represented by Fc; VL1-VL2-VH2-VH1-CH1-Fc; VH1-VH2-VL2-VL1-CH1-Fc; VL1-VL2-VH2-VH1-CL-Fc; VH1-VH2-VL2-VL1-CL-Fc; VL1-VL2-VH2-VH1-CH1-CL-Fc; VH1-VH2-VL2-VL1-CH1-CL-Fc; VL1-VL2-VH2-VH1-CL-CH1-Fc; VH1-VH2-VL2-VL1-CL-CH1-Fc; VL1-L1-VL2-L2-VH2-L3-VH1-L4-CH1-Fc; VH1-L1-VH2-L2-VL2-L3-VL1-L4-CH1-Fc; VL1-L1-VL2-L2-VH2-L3-VH1-L4-CL-Fc; VH1-L1-VH2-L2-VL2-L3-VL1-L4-CL-Fc; VL1-L1-VL2-L2-VH2-L3-VH1-L4-CH1-L5-CL-Fc; VH1-L1-VH2-L2-VL2-L3-VL1-L4-CH1-L5-CL-Fc; VL1-L1-VL2-L2-VH2-L3-VH1-L4-CL-L5-CH1-Fc; VH1-L1-VH2-L2-VL2-L3-VL1-L4-CL- L5-CH1-Fc; VL1-L1-VL2-L2-VH2-L3-VH1-L4-CH1-L5-Fc; VH1-L1-VH2-L2-VL2-L3-VL1-L4-CH1-L5-Fc; VL1- L1-VL2-L2-VH2-L3-VH1-L4-CL-L5-Fc; VH1-L1-VH2-L2-VL2-L3-VL1-L4-CL-L5-Fc; VL1-L1-VL2-L2-VH2-L3-VH1-L4-CH1-L5-CL-L6-Fc; VH1-L1-VH2-L2-VL2-L3-VL1-L4-CH1-L5-CL-L6-Fc; VL1-L1-VL2-L2-VH2-L3-VH1-L4-CL-L5-CH1-L6-Fc; or VH1-L1-VH2-L2-VL2-L3-VL1-L4-CL-L5-CH1-L6-Fc. In some aspects, the first polypeptide has a structure represented by VH1-VH2-VL2-VL1-CH1-CL-Fc and the second polypeptide has a structure represented by Fc; VL1-VL2-VH2-VH1-CH1-Fc; VH1-VH2-VL2-VL1-CH1-Fc; VL1-VL2-VH2-VH1-CL-Fc; VH1-VH2-VL2-VL1-CL-Fc; VL1-VL2-VH2-VH1-CH1-CL-Fc; VH1-VH2-VL2-VL1-CH1-CL-Fc; VL1-VL2-VH2-VH1-CL-CH1-Fc; VH1-VH2-VL2-VL1-CL-CH1-Fc; VL1-L1-VL2-L2-VH2-L3-VH1-L4-CH1-Fc; VH1-L1-VH2-L2-VL2-L3-VL1-L4-CH1-Fc; VL1-L1-VL2-L2-VH2-L3-VH1-L4-CL-Fc; VH1-L1-VH2-L2-VL2-L3-VL1-L4-CL-Fc; VL1-L1-VL2-L2-VH2-L3-VH1-L4-CH1-L5-CL-Fc; VH1-L1-VH2-L2-VL2-L3-VL1-L4-CH1-L5-CL-Fc; VL1-L1-VL2-L2-VH2-L3-VH1-L4-CL-L5-CH1-Fc; VH1-L1-VH2-L2-VL2-L3-VL1-L4-CL-L5-CH1-Fc; VL1-L1-VL2-L2-VH2-L3-VH1-L4-CH1-L5-Fc; VH1-L1-VH2-L2-VL2-L3-VL1-L4-CH1-L5-Fc; VL1-L1-VL2-L2-VH2-L3-VH1-L4-CL-L5-Fc; VH1-L1-VH2-L2-VL2-L3-VL1-L4-CL-L5-Fc; VL1-L1-VL2-L2-VH2-L3-VH1-L4-CH1-L5-CL-L6-Fc; VH1-L1-VH2-L2-VL2-L3-VL1-L4-CH1-L5-CL-L6-Fc; VL1-L1-VL2-L2-VH2-L3-VH1-L4-CL-L5-CH1-L6-Fc; or VH1-L1-VH2-L2-VL2-L3-VL1-L4-CL-L5-CH1-L6-Fc. In some aspects, the first polypeptide has a structure represented by VL1-VL2-VH2-VH1-CL-CH1-Fc and the second polypeptide has a structure represented by Fc; VL1-VL2-VH2-VH1-CH1-Fc; VH1-VH2-VL2-VL1-CH1-Fc; VL1-VL2-VH2-VH1-CL-Fc; VH1-VH2-VL2-VL1-CL-Fc; VL1-VL2-VH2-VH1-CH1-CL-Fc; VH1-VH2-VL2-VL1-CH1-CL-Fc; VL1-VL2-VH2-VH1-CL-CH1-Fc; VH1-VH2-VL2-VL1-CL-CH1-Fc; VL1-L1-VL2-L2-VH2-L3-VH1-L4-CH1-Fc; VH1-L1-VH2-L2-VL2-L3-VL1-L4-CH1-Fc; VL1-L1-VL2-L2-VH2-L3-VH1-L4- CL-Fc; VH1-L1-VH2-L2-VL2-L3-VL1-L4-CL-Fc; VL1-L1-VL2-L2-VH2-L3-VH1-L4-CH1-L5-CL-Fc; VH1-L1-VH2-L2-VL2-L3-VL1-L4-CH1-L5-CL-Fc; VL1-L1-VL2-L2-VH2-L3-VH1-L4-CL-L5-CH1-Fc; VH1-L1-VH2-L2-VL2-L3-VL1-L4-CL-L5-CH1-Fc; VL1-L1-VL2-L2-VH2-L3-VH1-L4-CH1-L5-Fc; VH1-L1-VH2-L2-VL2-L3-VL1-L4-CH1-L5-Fc; VL1-L1-VL2-L2-VH2-L3-VH1-L4-CL-L5-Fc; VH1-L1-VH2-L2-VL2-L3-VL1-L4-CL-L5-Fc; VL1-L1-VL2-L2-VH2-L3-VH1-L4-CH1-L5-CL-L6-Fc; VH1-L1-VH2-L2-VL2-L3-VL1-L4-CH1-L5-CL-L6-Fc; VL1-L1-VL2-L2-VH2-L3-VH1-L4-CL-L5-CH1-L6-Fc; or VH1-L1-VH2-L2-VL2-L3-VL1-L4-CL-L5-CH1-L6-Fc. In some aspects, the first polypeptide has a structure represented by VH1-VH2-VL2-VL1-CL-CH1-Fc and the second polypeptide has a structure represented by Fc; VL1-VL2-VH2-VH1-CH1-Fc; VH1-VH2-VL2-VL1-CH1-Fc; VL1-VL2-VH2-VH1-CL-Fc; VH1-VH2-VL2-VL1-CL-Fc; VL1-VL2-VH2-VH1-CH1-CL-Fc; VH1-VH2-VL2-VL1-CH1-CL-Fc; VL1-VL2-VH2-VH1-CL-CH1-Fc; VH1-VH2-VL2-VL1-CL-CH1-Fc; VL1-L1-VL2-L2-VH2-L3-VH1-L4-CH1-Fc; VH1-L1-VH2-L2-VL2-L3-VL1-L4-CH1-Fc; VL1-L1-VL2-L2-VH2-L3-VH1-L4-CL-Fc; VH1-L1-VH2-L2-VL2-L3-VL1-L4-CL-Fc; VL1-L1-VL2-L2-VH2-L3-VH1-L4-CH1-L5-CL-Fc; VH1-L1-VH2-L2-VL2-L3-VL1-L4-CH1-L5-CL-Fc; VL1-L1-VL2-L2-VH2-L3-VH1-L4-CL-L5-CH1-Fc; VH1-L1-VH2-L2-VL2-L3-VL1-L4-CL-L5-CH1-Fc; VL1-L1-VL2-L2-VH2-L3-VH1-L4-CH1-L5-Fc; VH1-L1-VH2-L2-VL2-L3-VL1-L4-CH1-L5-Fc; VL1-L1-VL2-L2-VH2-L3-VH1-L4-CL-L5-Fc; VH1-L1-VH2-L2-VL2-L3-VL1-L4-CL-L5-Fc; VL1-L1-VL2-L2-VH2-L3-VH1-L4-CH1-L5-CL-L6-Fc; VH1-L1-VH2-L2-VL2-L3-VL1-L4-CH1-L5-CL-L6-Fc; VL1-L1-VL2-L2-VH2-L3-VH1-L4-CL-L5-CH1-L6-Fc; or VH1-L1-VH2-L2-VL2-L3-VL1-L4-CL-L5-CH1-L6-Fc. In some aspects, the first polypeptide has a structure represented by VL1-L1-VL2-L2-VH2-L3-VH1-L4-CH1-Fc and the second polypeptide has a structure represented by Fc; VL1-VL2-VH2-VH1-CH1-Fc; VH1-VH2-VL2-VL1-CH1-Fc; VL1-VL2-VH2-VH1-CL-Fc; VH1-VH2-VL2-VL1-CL-Fc; VL1-VL2-VH2-VH1-CH1-CL-Fc; VH1-VH2-VL2-VL1-CH1-CL-Fc; VL1-VL2-VH2-VH1-CL-CH1-Fc; VH1-VH2-VL2-VL1-CL-CH1-Fc; VL1-L1-VL2-L2-VH2-L3-VH1-L4-CH1-Fc; VH1-L1-VH2-L2-VL2-L3-VL1-L4-CH1-Fe; VL1-L1-VL2-L2-VH2- L3-VH1-L4-CL-Fc; VH1-L1-VH2-L2-VL2-L3-VL1-L4-CL-Fc; VL1-L1-VL2-L2-VH2-L3-VH1-L4-CH1-L5-CL-Fc; VH1-L1-VH2-L2-VL2-L3-VL1-L4-CH1-L5-CL-Fc; VL1-L1-VL2-L2-VH2-L3-VH1-L4-CL-L5-CH1-Fc; VH1-L1-VH2-L2-VL2-L3-VL1-L4-CL-L5-CH1-Fc; VL1-L1-VL2-L2-VH2-L3-VH1-L4-CH1-L5-Fc; VH1-L1-VH2-L2-VL2-L3-VL1-L4-CH1-L5-Fc; VL1-L1-VL2-L2-VH2-L3-VH1-L4-CL-L5-Fc; VH1-L1-VH2-L2-VL2-L3-VL1-L4-CL-L5-Fc; VL1-L1-VL2-L2-VH2-L3-VH1-L4-CH1-L5-CL-L6-Fc; VH1-L1-VH2-L2-VL2-L3-VL1-L4-CH1-L5-CL-L6-Fc; VL1-L1-VL2-L2-VH2-L3-VH1-L4-CL-L5-CH1-L6-Fc; or VH1-L1-VH2-L2-VL2-L3-VL1-L4-CL-L5-CH1-L6-Fc. In some aspects, the first polypeptide has a structure represented by VH1-L1-VH2-L2-VL2-L3-VL1-L4-CH1-Fc and the second polypeptide has a structure represented by Fc; VL1-VL2-VH2-VH1-CH1-Fc; VH1-VH2-VL2-VL1-CH1-Fc; VL1-VL2-VH2-VH1-CL-Fc; VH1-VH2-VL2-VL1-CL-Fc; VL1-VL2-VH2-VH1-CH1-CL-Fc; VH1-VH2-VL2-VL1-CH1-CL-Fc; VL1-VL2-VH2-VH1-CL-CH1-Fc; VH1-VH2-VL2-VL1-CL-CH1-Fc; VL1-L1-VL2-L2-VH2-L3-VH1-L4-CH1-Fc; VH1-L1-VH2-L2-VL2-L3-VL1-L4-CH1-Fc; VL1-L1-VL2-L2-VH2-L3-VH1-L4-CL-Fc; VH1-L1-VH2-L2-VL2-L3-VL1-L4-CL-Fc; VL1-L1-VL2-L2-VH2-L3-VH1-L4-CH1-L5-CL-Fc; VH1-L1-VH2-L2-VL2-L3-VL1-L4-CH1-L5-CL- Fc; VL1-L1-VL2-L2-VH2-L3-VH1-L4-CL-L5-CH1-Fc; VH1-L1-VH2-L2-VL2-L3-VL1-L4-CL-L5-CH1-Fc; VL1-L1-VL2-L2-VH2-L3-VH1-L4-CH1-L5-Fc; VH1-L1-VH2-L2-VL2-L3-VL1-L4-CH1-L5-Fc; VL1-L1-VL2-L2-VH2- L3-VH1-L4-CL-L5-Fc; VH1-L1-VH2-L2-VL2-L3-VL1-L4-CL-L5-Fc; VL1-L1-VL2-L2-VH2-L3-VH1-L4-CH1-L5-CL-L6-Fc; VH1-L1-VH2-L2-VL2-L3-VL1-L4-CH1-L5-CL-L6-Fc; VL1-L1-VL2-L2-VH2-L3-VH1-L4-CL-L5-CH1-L6- Fc; or VH1-L1-VH2-L2-VL2-L3-VL1-L4-CL-L5-CH1-L6-Fc. In some aspects, the first polypeptide has a structure represented by VL1-L1-VL2-L2-VH2-L3-VH1-L4-CL-Fc and the second polypeptide has a structure represented by Fc; VL1-VL2-VH2-VH1-CH1-Fc; VH1-VH2-VL2-VL1-CH1-Fc; VL1-VL2-VH2-VH1-CL-Fc; VH1-VH2-VL2-VL1-CL-Fc; VL1-VL2-VH2-VH1-CH1-CL-Fc; VH1-VH2-VL2-VL1-CH1-CL-Fc; VL1-VL2-VH2-VH1-CL-CH1-Fc; VH1-VH2-VL2-VL1-CL-CH1-Fc; VL1-L1-VL2-L2-VH2-L3-VH1-L4-CH1-Fc; VH1-L1-VH2-L2-VL2-L3-VL1-L4-CH1-Fc; VL1-L1-VL2-L2-VH2-L3-VH1-L4-CL-Fc; VH1-L1-VH2-L2-VL2-L3-VL1-L4-CL-Fc; VL1-L1-VL2-L2-VH2-L3-VH1-L4-CH1-L5-CL-Fc; VH1-L1-VH2-L2-VL2-L3-VL1-L4-CH1-L5-CL-Fc; VL1-L1-VL2-L2-VH2-L3-VH1-L4-CL- L5-CH1-Fc; VH1-L1-VH2-L2-VL2-L3-VL1-L4-CL-L5-CH1-Fc; VL1-L1-VL2-L2-VH2-L3-VH1-L4-CH1-L5-Fc; VH1-L1-VH2-L2-VL2-L3-VL1-L4-CH1-L5-Fc; VL1-L1-VL2-L2-VH2-L3-VH1-L4-CL-L5-Fc; VH1-L1-VH2-L2-VL2-L3-VL1-L4-CL-L5-Fc; VL1-L1-VL2-L2-VH2-L3-VH1-L4-CH1-L5-CL-L6-Fc; VH1-L1-VH2-L2-VL2-L3-VL1-L4-CH1-L5-CL-L6-Fc; VL1-L1-VL2-L2-VH2-L3-VH1-L4-CL-L5-CH1-L6-Fc; or VH1-L1-VH2-L2-VL2-L3-VL1-L4-CL-L5-CH1-L6-Fc. In some aspects, the first polypeptide has a structure represented by VH1-L1-VH2-L2-VL2-L3-VL1-L4-CL-Fc and the second polypeptide has a structure represented by Fc; VL1-VL2-VH2-VH1-CH1-Fc; VH1-VH2-VL2-VL1-CH1-Fc; VL1-VL2-VH2-VH1-CL-Fc; VH1-VH2-VL2-VL1-CL-Fc; VL1-VL2-VH2-VH1-CH1-CL-Fc; VH1-VH2-VL2-VL1-CH1-CL-Fc; VL1-VL2-VH2-VH1-CL-CH1-Fc; VH1-VH2-VL2-VL1-CL-CH1-Fc; VL1-L1-VL2-L2-VH2-L3-VH1-L4-CH1-Fc; VH1-L1-VH2-L2-VL2-L3-VL1-L4-CH1-Fc; VL1-L1-VL2-L2-VH2-L3-VH1-L4- CL-Fc; VH1-L1-VH2-L2-VL2-L3-VL1-L4-CL-Fc; VL1-L1-VL2-L2-VH2-L3-VH1-L4-CH1-L5-CL-Fc; VH1-L1-VH2-L2-VL2-L3-VL1-L4-CH1-L5-CL-Fc; VL1-L1-VL2-L2-VH2-L3-VH1-L4-CL-L5-CH1-Fc; VH1-L1-VH2-L2-VL2-L3-VL1-L4-CL-L5-CH1-Fc; VL1-L1-VL2-L2-VH2-L3-VH1-L4-CH1-L5-Fc; VH1-L1-VH2-L2-VL2-L3-VL1-L4-CH1-L5-Fc; VL1-L1-VL2-L2-VH2-L3-VH1-L4-CL-L5-Fc; VH1-L1-VH2-L2-VL2-L3-VL1-L4-CL-L5-Fc; VL1-L1-VL2-L2-VH2-L3-VH1-L4-CH1-L5-CL-L6-Fc; VH1-L1-VH2-L2-VL2-L3-VL1-L4-CH1-L5-CL-L6-Fc; VL1-L1-VL2-L2-VH2-L3-VH1-L4-CL-L5-CH1-L6-Fc; or VH1-L1-VH2-L2-VL2-L3-VL1-L4-CL-L5-CH1-L6-Fc. In some aspects, the first polypeptide has a structure represented by VL1-L1-VL2-L2-VH2-L3-VH1-L4-CH1-L5-CL-Fc and the second polypeptide has a structure represented by Fc; VL1-VL2-VH2-VH1-CH1-Fc; VH1-VH2-VL2-VL1-CH1-Fc; VL1-VL2-VH2-VH1-CL-Fc; VH1-VH2-VL2-VL1-CL-Fc; VL1-VL2-VH2-VH1-CH1-CL-Fc; VH1-VH2-VL2-VL1-CH1-CL-Fc; VL1-VL2-VH2-VH1-CL-CH1-Fc; VH1-VH2-VL2-VL1-CL-CH1-Fc; VL1-L1-VL2-L2-VH2-L3-VH1-L4-CH1-Fc; VH1-L1-VH2-L2-VL2-L3-VL1-L4-CH1-Fc; VL1-L1-VL2-L2-VH2-L3-VH1-L4-CL-Fc; VH1-L1-VH2-L2-VL2-L3-VL1-L4-CL-Fc; VL1-L1-VL2-L2-VH2-L3-VH1-L4-CH1-L5-CL-Fc; VH1-L1-VH2-L2-VL2-L3-VL1-L4-CH1-L5-CL- Fc; VL1-L1-VL2-L2-VH2-L3-VH1-L4-CL-L5-CH1-Fc; VH1-L1-VH2-L2-VL2-L3-VL1-L4-CL-L5-CH1-Fc; VL1-L1-VL2-L2-VH2-L3-VH1-L4-CH1-L5-Fc; VH1-L1-VH2-L2-VL2-L3-VL1-L4-CH1-L5-Fc; VL1-L1-VL2-L2-VH2- L3-VH1-L4-CL-L5-Fc; VH1-L1-VH2-L2-VL2-L3-VL1-L4-CL-L5-Fc; VL1-L1-VL2-L2-VH2-L3-VH1-L4-CH1-L5-CL-L6-Fc; VH1-L1-VH2-L2-VL2-L3-VL1-L4-CH1-L5-CL-L6-Fc; VL1-L1-VL2-L2-VH2-L3-VH1-L4-CL-L5-CH1-L6- Fc; or VH1-L1-VH2-L2-VL2-L3-VL1-L4-CL-L5-CH1-L6-Fc. In some aspects, the first polypeptide has a structure represented by VH1-L1-VH2-L2-VL2-L3-VL1-L4-CH1-L5-CL-Fc and the second polypeptide has a structure represented by Fc; VL1-VL2-VH2-VH1-CH1-Fc; VH1-VH2-VL2-VL1-CH1-Fc; VL1-VL2-VH2-VH1-CL-Fc; VH1-VH2-VL2-VL1-CL-Fc; VL1-VL2-VH2-VH1-CH1-CL-Fc; VH1-VH2-VL2-VL1-CH1-CL-Fc; VL1-VL2-VH2-VH1-CL-CH1-Fc; VH1-VH2-VL2-VL1-CL-CH1-Fc; VL1-L1-VL2-L2-VH2-L3-VH1-L4-CH1-Fc; VH1-L1-VH2-L2-VL2-L3-VL1-L4-CH1-Fc; VL1-L1-VL2-L2-VH2-L3-VH1-L4-CL-Fc; VH1-L1-VH2-L2-VL2-L3-VL1-L4-CL-Fc; VL1-L1-VL2-L2-VH2-L3-VH1-L4-CH1-L5-CL-Fc; VH1-L1-VH2-L2-VL2-L3-VL1-L4-CH1-L5-CL-Fc; VL1-L1-VL2-L2-VH2-L3-VH1-L4-CL-L5-CH1-Fc; VH1-L1-VH2-L2-VL2-L3-VL1-L4-CL-L5-CH1-Fc; VL1-L1-VL2-L2-VH2-L3-VH1-L4-CH1-L5-Fc; VH1-L1-VH2-L2-VL2-L3-VL1-L4-CH1-L5-Fc; VL1-L1-VL2-L2-VH2-L3-VH1-L4-CL-L5-Fc; VH1-L1-VH2-L2-VL2-L3-VL1-L4-CL-L5-Fc; VL1-L1-VL2-L2-VH2-L3-VH1-L4-CH1-L5-CL-L6-Fc; VH1-L1-VH2-L2-VL2-L3-VL1-L4-CH1-L5-CL-L6-Fc; VL1-L1-VL2-L2-VH2-L3-VH1-L4-CL-L5-CH1-L6-Fc; or VH1-L1-VH2-L2-VL2-L3-VL1-L4-CL-L5-CH1-L6-Fc. In some aspects, the first polypeptide has a structure represented by VL1-L1-VL2-L2-VH2-L3-VH1-L4-CL-L5-CH1-Fc and the second polypeptide has a structure represented by Fc; VL1-VL2-VH2-VH1-CH1-Fc; VH1-VH2-VL2-VL1-CH1-Fc; VL1-VL2-VH2-VH1-CL-Fc; VH1-VH2-VL2-VL1-CL-Fc; VL1-VL2-VH2-VH1-CH1-CL-Fc; VH1-VH2-VL2-VL1-CH1-CL-Fc; VL1-VL2-VH2-VH1-CL-CH1-Fc; VH1-VH2-VL2-VL1-CL-CH1-Fc; VL1-L1-VL2-L2-VH2-L3-VH1-L4-CH1-Fc; VH1-L1-VH2-L2-VL2-L3-VL1-L4-CH1-Fc; VL1-L1-VL2-L2-VH2-L3-VH1-L4-CL-Fc; VH1-L1-VH2-L2-VL2-L3-VL1-L4-CL-Fc; VL1-L1-VL2-L2-VH2-L3-VH1-L4-CH1-L5-CL-Fc; VH1-L1-VH2-L2-VL2-L3-VL1-L4-CH1-L5-CL-Fc; VL1-L1-VL2-L2-VH2-L3-VH1-L4-CL-L5-CH1-Fc; VH1-L1-VH2-L2-VL2-L3-VL1-L4-CL-L5-CH1-Fc; VL1-L1-VL2-L2-VH2-L3-VH1-L4-CH1-L5-Fc; VH1-L1-VH2-L2-VL2-L3-VL1-L4-CH1-L5-Fc; VL1-L1-VL2-L2-VH2-L3-VH1-L4-CL-L5-Fc; VH1-L1-VH2-L2-VL2-L3-VL1-L4-CL-L5-Fc; VL1-L1-VL2-L2-VH2-L3-VH1-L4-CH1-L5-CL-L6-Fc; VH1-L1-VH2-L2-VL2-L3-VL1-L4-CH1-L5-CL-L6- Fc; VL1-L1-VL2-L2-VH2-L3-VH1-L4-CL-L5-CH1-L6-Fc; or VH1-L1-VH2-L2-VL2-L3-VL1-L4-CL-L5-CH1-L6-Fc. In some aspects, the first polypeptide has a structure represented by VH1-L1-VH2-L2-VL2-L3-VL1-L4-CL-L5-CH1-Fc and the second polypeptide has a structure represented by Fc; VL1-VL2-VH2-VH1-CH1-Fc; VH1-VH2-VL2-VL1-CH1-Fc; VL1-VL2-VH2-VH1-CL-Fc; VH1-VH2-VL2-VL1-CL-Fc; VL1-VL2-VH2-VH1-CH1-CL-Fc; VH1-VH2-VL2-VL1-CH1-CL-Fc; VL1-VL2-VH2-VH1-CL-CH1-Fc; VH1-VH2-VL2-VL1-CL-CH1-Fc; VL1-L1-VL2-L2-VH2-L3-VH1-L4-CH1-Fc; VH1-L1-VH2-L2-VL2-L3-VL1-L4-CH1-Fc; VL1-L1-VL2-L2-VH2-L3-VH1-L4-CL-Fc; VH1-L1-VH2-L2-VL2-L3-VL1-L4-CL-Fc; VL1-L1-VL2-L2-VH2-L3-VH1-L4-CH1-L5-CL-Fc; VH1-L1-VH2-L2-VL2-L3-VL1-L4-CH1-L5-CL-Fc; VL1-L1-VL2-L2-VH2-L3-VH1-L4-CL-L5-CH1-Fc; VH1-L1-VH2-L2-VL2-L3-VL1-L4-CL- L5-CH1-Fc; VL1-L1-VL2-L2-VH2-L3-VH1-L4-CH1-L5-Fc; VH1-L1-VH2-L2-VL2-L3-VL1-L4-CH1-L5-Fc; VL1- L1-VL2-L2-VH2-L3-VH1-L4-CL-L5-Fc; VH1-L1-VH2-L2-VL2-L3-VL1-L4-CL-L5-Fc; VL1-L1-VL2-L2-VH2-L3-VH1-L4-CH1-L5-CL-L6-Fc; VH1-L1-VH2-L2-VL2-L3-VL1-L4-CH1-L5-CL-L6-Fc; VL1-L1-VL2-L2-VH2-L3-VH1-L4-CL-L5-CH1-L6-Fc; or VH1-L1-VH2-L2-VL2-L3-VL1-L4-CL-L5-CH1-L6-Fc. In some aspects, the first polypeptide has a structure represented by VL1-L1-VL2-L2-VH2-L3-VH1-L4-CH1-L5-Fc and the second polypeptide has a structure represented by Fc; VL1-VL2-VH2-VH1-CH1-Fc; VH1-VH2-VL2-VL1-CH1-Fc; VL1-VL2-VH2-VH1-CL-Fc; VH1-VH2-VL2-VL1-CL-Fc; VL1-VL2-VH2-VH1-CH1-CL-Fc; VH1-VH2-VL2-VL1-CH1-CL-Fc; VL1-VL2-VH2-VH1-CL-CH1-Fc; VH1-VH2-VL2-VL1-CL-CH1-Fc; VL1-L1-VL2-L2-VH2-L3-VH1-L4-CH1-Fc; VH1-L1-VH2-L2-VL2-L3-VL1-L4-CH1-Fc; VL1-L1-VL2-L2-VH2-L3-VH1-L4-CL-Fc; VH1-L1-VH2-L2-VL2-L3-VL1-L4-CL-Fc; VL1-L1-VL2-L2-VH2-L3-VH1-L4-CH1-L5-CL-Fc; VH1-L1-VH2-L2-VL2-L3-VL1-L4-CH1-L5-CL-Fc; VL1-L1-VL2-L2-VH2-L3-VH1-L4-CL-L5-CH1-Fc; VH1-L1-VH2-L2-VL2-L3-VL1-L4-CL-L5-CH1-Fc; VL1-L1-VL2-L2-VH2-L3-VH1-L4-CH1-L5-Fc; VH1-L1-VH2-L2-VL2-L3-VL1-L4-CH1-L5-Fc; VL1-L1-VL2-L2-VH2-L3-VH1- L4-CL-L5-Fc; VH1-L1-VH2-L2-VL2-L3-VL1-L4-CL-L5-Fc; VL1-L1-VL2-L2-VH2-L3-VH1-L4-CH1-L5-CL-L6-Fc; VH1-L1-VH2-L2-VL2-L3-VL1-L4-CH1-L5-CL-L6-Fc; VL1-L1-VL2-L2-VH2-L3-VH1-L4-CL-L5-CH1-L6-Fc; or VH1-L1-VH2-L2-VL2-L3-VL1-L4-CL-L5-CH1-L6-Fc. In some aspects, the first polypeptide has a structure represented by VH1-L1-VH2-L2-VL2-L3-VL1-L4-CH1-L5-Fc and the second polypeptide has a structure represented by Fc; VL1-VL2-VH2-VH1-CH1-Fc; VH1-VH2-VL2-VL1-CH1-Fc; VL1-VL2-VH2-VH1-CL-Fc; VH1-VH2-VL2-VL1-CL-Fc; VL1-VL2-VH2-VH1-CH1-CL-Fc; VH1-VH2-VL2-VL1-CH1-CL-Fc; VL1-VL2-VH2-VH1-CL-CH1-Fc; VH1-VH2-VL2-VL1-CL-CH1-Fc; VL1-L1-VL2-L2-VH2-L3-VH1-L4-CH1-Fc; VH1-L1-VH2-L2-VL2-L3-VL1-L4-CH1-Fc; VL1-L1-VL2-L2-VH2-L3-VH1-L4-CL-Fc; VH1-L1-VH2-L2-VL2-L3-VL1-L4-CL-Fc; VL1-L1-VL2-L2-VH2-L3-VH1-L4-CH1-L5-CL-Fc; VH1-L1-VH2-L2-VL2-L3-VL1-L4-CH1-L5-CL-Fc; VL1-L1-VL2-L2-VH2-L3-VH1-L4-CL-L5-CH1-Fc; VH1-L1-VH2-L2-VL2-L3-VL1-L4-CL-L5-CH1-Fc; VL1-L1-VL2-L2-VH2-L3-VH1-L4-CH1-L5-Fc; VH1-L1-VH2-L2-VL2-L3-VL1-L4-CH1-L5-Fc; VL1-L1-VL2-L2-VH2-L3-VH1-L4-CL-L5-Fc; VH1-L1-VH2-L2-VL2-L3-VL1-L4-CL-L5-Fc; VL1-L1-VL2-L2-VH2-L3-VH1-L4-CH1-L5-CL-L6-Fc; VH1-L1-VH2-L2-VL2-L3-VL1-L4-CH1-L5-CL-L6-Fc; VL1-L1-VL2-L2-VH2-L3-VH1-L4-CL-L5-CH1-L6-Fc; or VH1-L1-VH2-L2-VL2-L3-VL1-L4-CL-L5-CH1-L6-Fc. In some aspects, the first polypeptide has a structure represented by VL1-L1-VL2-L2-VH2-L3-VH1-L4-CL-L5-Fc and the second polypeptide has a structure represented by Fc; VL1-VL2-VH2-VH1-CH1-Fc; VH1-VH2-VL2-VL1-CH1-Fc; VL1-VL2-VH2-VH1-CL-Fc; VH1-VH2-VL2-VL1-CL-Fc; VL1-VL2-VH2-VH1-CH1-CL-Fc; VH1-VH2-VL2-VL1-CH1-CL-Fc; VL1-VL2-VH2-VH1-CL-CH1-Fc; VH1-VH2-VL2-VL1-CL-CH1-Fc; VL1-L1-VL2-L2-VH2-L3-VH1-L4-CH1-Fc; VH1-L1-VH2-L2-VL2-L3-VL1-L4-CH1-Fc; VL1-L1-VL2-L2-VH2-L3- VH1-L4-CL-Fc; VH1-L1-VH2-L2-VL2-L3-VL1-L4-CL-Fc; VL1-L1-VL2-L2-VH2-L3-VH1-L4-CH1-L5-CL-Fc; VH1-L1-VH2-L2-VL2-L3-VL1-L4-CH1-L5-CL-Fc; VL1-L1-VL2-L2-VH2-L3-VH1-L4-CL-L5-CH1-Fc; VH1-L1-VH2-L2-VL2-L3-VL1-L4-CL-L5-CH1-Fc; VL1-L1-VL2-L2-VH2-L3-VH1-L4-CH1-L5-Fc; VH1-L1-VH2-L2-VL2-L3-VL1-L4-CH1-L5-Fc; VL1-L1-VL2-L2-VH2-L3-VH1-L4-CL-L5-Fc; VH1-L1-VH2-L2-VL2-L3-VL1-L4-CL-L5-Fc; VL1-L1-VL2-L2-VH2-L3-VH1-L4-CH1-L5-CL-L6-Fc; VH1-L1-VH2-L2-VL2-L3-VL1-L4-CH1-L5-CL-L6-Fc; VL1-L1-VL2-L2-VH2-L3-VH1-L4-CL-L5-CH1-L6-Fc; or VH1-L1-VH2-L2-VL2-L3-VL1-L4-CL-L5-CH1-L6-Fc. In some aspects, the first polypeptide has a structure represented by VH1-L1-VH2-L2-VL2-L3-VL1-L4-CL-L5-Fc and the second polypeptide has a structure represented by Fc; VL1-VL2-VH2-VH1-CH1-Fc; VH1-VH2-VL2-VL1-CH1-Fc; VL1-VL2-VH2-VH1-CL-Fc; VH1-VH2-VL2-VL1-CL-Fc; VL1-VL2-VH2-VH1-CH1-CL-Fc; VH1-VH2-VL2-VL1-CH1-CL-Fc; VL1-VL2-VH2-VH1-CL-CH1-Fc; VH1-VH2-VL2-VL1-CL-CH1-Fc; VL1-L1-VL2-L2-VH2-L3-VH1-L4-CH1-Fc; VH1-L1-VH2-L2-VL2-L3-VL1-L4-CH1-Fc; VL1-L1-VL2-L2-VH2-L3-VH1-L4-CL-Fc; VH1-L1-VH2-L2-VL2-L3-VL1-L4-CL-Fc; VL1-L1-VL2-L2-VH2-L3-VH1-L4-CH1-L5-CL-Fc; VH1-L1-VH2-L2-VL2-L3-VL1-L4-CH1-L5-CL- Fc; VL1-L1-VL2-L2-VH2-L3-VH1-L4-CL-L5-CH1-Fc; VH1-L1-VH2-L2-VL2-L3-VL1-L4-CL-L5-CH1-Fc; VL1-L1-VL2-L2-VH2-L3-VH1-L4-CH1-L5-Fc; VH1-L1-VH2-L2-VL2-L3-VL1-L4-CH1-L5-Fc; VL1-L1-VL2-L2-VH2- L3-VH1-L4-CL-L5-Fc; VH1-L1-VH2-L2-VL2-L3-VL1-L4-CL-L5-Fc; VL1-L1-VL2-L2-VH2-L3-VH1-L4-CH1-L5-CL-L6-Fc; VH1-L1-VH2-L2-VL2-L3-VL1-L4-CH1-L5-CL-L6-Fc; VL1-L1-VL2-L2-VH2-L3-VH1-L4-CL-L5-CH1-L6- Fc; or VH1-L1-VH2-L2-VL2-L3-VL1-L4-CL-L5-CH1-L6-Fc. In some aspects, the first polypeptide has a structure represented by VL1-L1-VL2-L2-VH2-L3-VH1-L4-CH1-L5-CL-L6-Fc and the second polypeptide has a structure represented by Fc; VL1-VL2-VH2-VH1-CH1-Fc; VH1-VH2-VL2-VL1-CH1-Fc; VL1-VL2-VH2-VH1-CL-Fc; VH1-VH2-VL2-VL1-CL-Fc; VL1-VL2-VH2-VH1-CH1-CL-Fc; VH1-VH2-VL2-VL1-CH1-CL-Fc; VL1-VL2-VH2-VH1-CL-CH1-Fc; VH1-VH2-VL2-VL1-CL-CH1-Fc; VL1-L1-VL2-L2-VH2-L3-VH1-L4-CH1-Fc; VH1-L1-VH2-L2-VL2-L3-VL1-L4-CH1-Fc; VL1-L1-VL2-L2-VH2-L3-VH1-L4-CL-Fc; VH1-L1-VH2-L2-VL2-L3-VL1-L4-CL-Fc; VL1-L1-VL2-L2-VH2-L3-VH1-L4-CH1-L5-CL-Fc; VH1-L1-VH2-L2-VL2-L3-VL1-L4-CH1-L5-CL-Fc; VL1-L1-VL2-L2-VH2-L3-VH1-L4-CL-L5-CH1-Fc; VH1-L1-VH2-L2-VL2-L3-VL1-L4-CL-L5-CH1-Fc; VL1-L1-VL2-L2-VH2-L3-VH1-L4-CH1-L5-Fc; VH1-L1-VH2-L2-VL2-L3-VL1-L4-CH1-L5-Fc; VL1-L1-VL2-L2-VH2-L3-VH1-L4-CL-L5-Fc; VH1-L1-VH2-L2-VL2-L3-VL1-L4-CL-L5-Fc; VL1-L1-VL2-L2-VH2-L3-VH1-L4-CH1-L5-CL-L6-Fc; VH1-L1-VH2-L2-VL2-L3-VL1-L4-CH1-L5-CL-L6-Fc; VL1-L1-VL2-L2-VH2-L3-VH1-L4-CL-L5-CH1-L6-Fc; or VH1-L1-VH2-L2-VL2-L3-VL1-L4-CL-L5-CH1-L6-Fc. In some aspects, the first polypeptide has a structure represented by VH1-L1-VH2-L2-VL2-L3-VL1-L4-CH1-L5-CL-L6-Fc and the second polypeptide has a structure represented by Fc; VL1-VL2-VH2-VH1-CH1-Fc; VH1-VH2-VL2-VL1-CH1-Fc; VL1-VL2-VH2-VH1-CL-Fc; VH1-VH2-VL2-VL1-CL-Fc; VL1-VL2-VH2-VH1-CH1-CL-Fc; VH1-VH2-VL2-VL1-CH1-CL-Fc; VL1-VL2-VH2-VH1-CL-CH1-Fc; VH1-VH2-VL2-VL1-CL-CH1-Fc; VL1-L1-VL2-L2-VH2-L3-VH1-L4-CH1-Fc; VH1-L1-VH2-L2-VL2-L3-VL1-L4-CH1-Fc; VL1-L1-VL2-L2-VH2-L3-VH1-L4-CL-Fc; VH1-L1-VH2-L2-VL2-L3-VL1-L4-CL-Fc; VL1-L1-VL2-L2-VH2-L3-VH1-L4-CH1-L5-CL-Fc; VH1-L1-VH2-L2-VL2-L3-VL1-L4-CH1-L5-CL-Fc; VL1-L1-VL2-L2-VH2-L3-VH1-L4-CL-L5-CH1-Fc; VH1-L1-VH2-L2-VL2-L3-VL1-L4-CL-L5-CH1-Fc; VL1-L1-VL2-L2-VH2-L3-VH1-L4-CH1-L5-Fc; VH1-L1-VH2-L2-VL2-L3-VL1-L4-CH1-L5-Fc; VL1-L1-VL2-L2-VH2-L3-VH1-L4-CL-L5-Fc; VH1-L1-VH2-L2-VL2-L3-VL1-L4-CL-L5-Fc; VL1-L1-VL2-L2-VH2-L3-VH1-L4-CH1-L5-CL-L6-Fc; VH1-L1-VH2-L2-VL2-L3-VL1-L4-CH1-L5-CL-L6-Fc; VL1-L1-VL2-L2-VH2-L3-VH1-L4-CL-L5-CH1-L6-Fc; or VH1-L1-VH2-L2-VL2-L3-VL1-L4-CL-L5-CH1-L6-Fc. In some aspects, the first polypeptide has a structure represented by VL1-L1-VL2-L2-VH2-L3-VH1-L4-CL-L5-CH1-L6-Fc and the second polypeptide has a structure represented by Fc; VL1-VL2-VH2-VH1-CH1-Fc; VH1-VH2-VL2-VL1-CH1-Fc; VL1-VL2-VH2-VH1-CL-Fc; VH1-VH2-VL2-VL1-CL-Fc; VL1-VL2-VH2-VH1-CH1-CL-Fc; VH1-VH2-VL2-VL1-CH1-CL-Fc; VL1-VL2-VH2-VH1-CL-CH1-Fc; VH1-VH2-VL2-VL1-CL-CH1-Fc; VL1-L1-VL2-L2-VH2-L3-VH1-L4-CH1-Fc; VH1-L1-VH2-L2-VL2-L3-VL1-L4-CH1-Fc; VL1-L1-VL2-L2-VH2-L3-VH1-L4- CL-Fc; VH1-L1-VH2-L2-VL2-L3-VL1-L4-CL-Fc; VL1-L1-VL2-L2-VH2-L3-VH1-L4-CH1-L5-CL-Fc; VH1-L1-VH2-L2-VL2-L3-VL1-L4-CH1-L5-CL-Fc; VL1-L1-VL2-L2-VH2-L3-VH1-L4-CL-L5-CH1-Fc; VH1-L1-VH2-L2-VL2-L3-VL1-L4-CL-L5-CH1-Fc; VL1-L1-VL2-L2-VH2-L3-VH1-L4-CH1-L5-Fc; VH1-L1-VH2-L2-VL2-L3-VL1-L4-CH1-L5-Fc; VL1-L1-VL2-L2-VH2-L3-VH1-L4-CL-L5-Fc; VH1-L1-VH2-L2-VL2-L3-VL1-L4-CL-L5-Fc; VL1-L1-VL2-L2-VH2-L3-VH1-L4-CH1-L5-CL-L6-Fc; VH1-L1-VH2-L2-VL2-L3-VL1-L4-CH1-L5-CL-L6-Fc; VL1-L1-VL2-L2-VH2-L3-VH1-L4-CL-L5-CH1-L6-Fc; or VH1-L1-VH2-L2-VL2-L3-VL1-L4-CL-L5-CH1-L6-Fc. In some aspects, the first polypeptide has a structure represented by VH1-L1-VH2-L2-VL2-L3-VL1-L4-CL-L5-CH1-L6-Fc and the second polypeptide has a structure represented by Fc; VL1-VL2-VH2-VH1-CH1-Fc; VH1-VH2-VL2-VL1-CH1-Fc; VL1-VL2-VH2-VH1-CL-Fc; VH1-VH2-VL2-VL1-CL-Fc; VL1-VL2-VH2-VH1-CH1-CL-Fc; VH1-VH2-VL2-VL1-CH1-CL-Fc; VL1-VL2-VH2-VH1-CL-CH1-Fc; VH1-VH2-VL2-VL1-CL-CH1-Fc; VL1-L1-VL2-L2-VH2-L3-VH1-L4-CH1-Fc; VH1-L1-VH2-L2-VL2-L3-VL1-L4-CH1-Fc; VL1-L1-VL2-L2-VH2-L3-VH1-L4-CL-Fc; VH1-L1-VH2-L2-VL2-L3-VL1-L4-CL-Fc; VL1-L1-VL2-L2-VH2-L3-VH1-L4-CH1-L5-CL-Fc; VH1-L1-VH2-L2-VL2-L3-VL1-L4-CH1-L5-CL- Fc; VL1-L1-VL2-L2-VH2-L3-VH1-L4-CL-L5-CH1-Fc; VH1-L1-VH2-L2-VL2-L3-VL1-L4-CL-L5-CH1-Fc; VL1-L1-VL2-L2-VH2-L3-VH1-L4-CH1-L5-Fc; VH1-L1-VH2-L2-VL2-L3-VL1-L4-CH1-L5-Fc; VL1-L1-VL2-L2-VH2- L3-VH1-L4-CL-L5-Fc; VH1-L1-VH2-L2-VL2-L3-VL1-L4-CL-L5-Fc; VL1-L1-VL2-L2-VH2-L3-VH1-L4-CH1-L5-CL-L6-Fc; VH1-L1-VH2-L2-VL2-L3-VL1-L4-CH1-L5-CL-L6-Fc; VL1-L1-VL2-L2-VH2-L3-VH1-L4-CL-L5-CH1-L6- Fc; or VH1-L1-VH2-L2-VL2-L3-VL1-L4-CL-L5-CH1-L6-Fc.

[0285] In some aspects, an antigen binding polypeptide complex of the invention comprises a first polypeptide and a second polypeptide; wherein the first polypeptide has a structure represented by: VL1-VL2-VH2-VH1; VH1-VH2-VL2-VL1; VL1-L1-VL2-L2-VH2-L3-VH1; VH1-L1-VH2-L2-VL2-L3-VL1; VL1-VL2-VH2-VH1-Fc; VH1-VH2-VL2-VL1-Fc; VL1-L1-VL2-L2-VH2-L3-VH1-Fc; VH1-L1-VH2-L2-VL2-L3-VL1-Fc; VL1-L1-VL2-L2-VH2-L3-VH1-L4-Fc; VH1-L1-VH2-L2-VL2-L3-VL1-L4-Fc; VL1-VL2-VH2-VH1-CH1; VH1-VH2-VL2-VL1-CH1; VL1-VL2-VH2-VH1-CL; VH1-VH2-VL2-VL1-CL; VL1-VL2-VH2-VH1-CH1-CL; VH1-VH2-VL2-VL1-CH1-CL; VL1-VL2-VH2-VH1-CL-CH1; VH1-VH2-VL2-VL1-CL-CH1; VL1-L1-VL2-L2-VH2-L3-VH1-L4-CH1; VH1-L1-VH2-L2-VL2-L3-VL1-L4-CH1; VL1-L1-VL2-L2-VH2-L3-VH1-L4-CL; VH1-L1-VH2-L2-VL2-L3-VL1-L4-CL; VL1-L1-VL2-L2- VH2-L3-VH1-L4-CH1-L5-CL; VH1-L1-VH2-L2-VL2-L3-VL1-L4-CH1-L5-CL; VL1-L1-VL2-L2-VH2-L3-VH1-L4- CL-L5-CH1; VH1-L1-VH2-L2-VL2-L3-VL1-L4-CL-L5-CH1; VL1-VL2-VH2-VH1-CH1-Fc; VH1-VH2-VL2-VL1-CH1-Fc; VL1-VL2-VH2-VH1-CL-Fc; VH1-VH2-VL2-VL1-CL-Fc; VL1-VL2-VH2-VH1-CH1-CL-Fc; VH1-VH2-VL2-VL1-CH1-CL-Fc; VL1-VL2-VH2-VH1-CL-CH1-Fc; VH1-VH2-VL2-VL1-CL-CH1-Fc; VL1-L1-VL2-L2-VH2-L3-VH1-L4-CH1-Fc; VH1-L1-VH2-L2-VL2-L3-VL1-L4-CH1-Fc; VL1-L1-VL2-L2-VH2-L3-VH1-L4-CL-Fc; VH1-L1-VH2-L2-VL2-L3-VL1-L4-CL-Fc; VL1-L1-VL2-L2-VH2-L3-VH1-L4-CH1-L5-CL-Fc; VH1-L1-VH2-L2-VL2-L3-VL1-L4-CH1-L5-CL-Fc; VL1-L1-VL2-L2-VH2-L3-VH1-L4-CL-L5-CH1-Fc; VH1-L1-VH2-L2-VL2-L3-VL1-L4-CL-L5-CH1-Fc; VL1-L1-VL2-L2-VH2-L3-VH1-L4-CH1-L5-Fc; VH1-L1-VH2-L2-VL2-L3-VL1-L4-CH1-L5-Fc; VL1-L1-VL2-L2-VH2-L3-VH1-L4-CL-L5-Fc; VH1-L1-VH2-L2-VL2-L3-VL1-L4-CL-L5-Fc; VL1-L1-VL2-L2-VH2-L3-VH1-L4-CH1-L5-CL-L6-Fc; VH1-L1-VH2-L2-VL2-L3-VL1-L4-CH1-L5-CL-L6-Fc; VL1-L1-VL2-L2-VH2-L3-VH1-L4-CL-L5-CH1-L6-Fc; or VH1-L1-VH2-L2-VL2-L3-VL1-L4-CL-L5-CH1-L6-Fc; wherein the second polypeptide has a structure represented by VL1-VL2-VH2-VH1; VH1-VH2-VL2-VL1; VL1-L1-VL2-L2-VH2-L3-VH1; VH1-L1-VH2-L2-VL2-L3-VL1; VL1-VL2-VH2-VH1-Fc; VH1-VH2-VL2-VL1-Fc; VL1-L1-VL2-L2-VH2-L3-VH1-Fc; VH1-L1-VH2-L2-VL2-L3-VL1-Fc; VL1-L1-VL2-L2-VH2-L3-VH1-L4-Fc; VH1-L1-VH2-L2-VL2-L3-VL1-L4-Fc; VL1-VL2-VH2-VH1-CH1; VH1-VH2-VL2-VL1-CH1; VL1-VL2-VH2-VH1-CL; VH1-VH2-VL2-VL1-CL; VL1-VL2-VH2-VH1-CH1-CL; VH1-VH2-VL2-VL1-CH1-CL; VL1-VL2-VH2-VH1-CL-CH1; VH1-VH2-VL2-VL1-CL-CH1; VL1-L1-VL2-L2-VH2-L3-VH1-L4-CH1; VH1-L1-VH2-L2-VL2-L3-VL1-L4-CH1; VL1-L1-VL2-L2-VH2-L3-VH1-L4-CL; VH1-L1- VH2-L2-VL2-L3-VL1-L4-CL; VL1-L1-VL2-L2-VH2-L3-VH1-L4-CH1-L5-CL; VH1-L1-VH2-L2-VL2-L3-VL1-L4-CH1- L5-CL; VL1-L1-VL2-L2-VH2-L3-VH1-L4-CL-L5-CH1; VH1-L1-VH2-L2-VL2-L3-VL1-L4-CL-L5-CH1; VL1-VL2-VH2-VH1-CH1-Fc; VH1-VH2-VL2-VL1-CH1-Fc; VL1-VL2-VH2-VH1-CL-Fc; VH1-VH2-VL2-VL1-CL-Fc; VL1-VL2-VH2-VH1-CH1-CL-Fc; VH1-VH2-VL2-VL1-CH1-CL-Fc; VL1-VL2-VH2-VH1-CL-CH1-Fc; VH1-VH2-VL2-VL1-CL-CH1-Fc; VL1-L1-VL2-L2-VH2-L3-VH1-L4-CH1-Fc; VH1-L1-VH2-L2-VL2-L3-VL1-L4-CH1-Fc; VL1-L1-VL2-L2-VH2-L3-VH1-L4-CL-Fc; VH1-L1-VH2-L2-VL2-L3-VL1-L4-CL-Fc; VL1-L1-VL2-L2-VH2-L3-VH1-L4-CH1-L5-CL-Fc; VH1-L1-VH2-L2-VL2-L3-VL1-L4-CH1-L5-CL-Fc; VL1-L1-VL2-L2-VH2-L3-VH1-L4-CL-L5-CH1-Fc; VH1-L1-VH2-L2-VL2-L3-VL1-L4-CL-L5-CH1-Fc; VL1-L1-VL2-L2-VH2-L3-VH1-L4-CH1-L5-Fc; VH1-L1-VH2-L2-VL2-L3-VL1-L4-CH1-L5-Fc; VL1-L1-VL2-L2-VH2-L3-VH1-L4-CL-L5-Fc; VH1-L1-VH2-L2-VL2-L3-VL1-L4-CL-L5-Fc; VL1-L1-VL2-L2-VH2-L3-VH1-L4-CH1-L5-CL-L6-Fc; VH1-L1-VH2-L2-VL2-L3-VL1-L4-CH1-L5-CL-L6-Fc; VL1-L1-VL2-L2-VH2-L3-VH1-L4-CL-L5-CH1-L6-Fc; or VH1-L1-VH2-L2-VL2-L3-VL1-L4-CL-L5-CH1-L6-Fc; wherein VL1 is a first immunoglobulin light chain variable region that specifically binds to an HIV protein; VL2 is a second immunoglobulin light chain variable region that specifically binds to an HIV protein; VH1 is a first immunoglobulin heavy chain variable region that specifically binds to an HIV protein; VH2 is a second immunoglobulin heavy chain variable region that specifically binds to an HIV protein; CH1 is an immunoglobulin heavy chain constant region 1; CL is an immunoglobulin light chain constant region; Fc is a region comprising an immunoglobulin heavy chain constant region 2 (CH2), an immunoglobulin heavy chain constant region 3 (CH3), and optionally, an immunoglobulin hinge; and L1, L2, L3, L4, L5 and L6 are amino acid linkers. In some aspects, the first polypeptide has a structure represented by VL1-VL2-VH2-VH1 and the second polypeptide has a structure represented by VL1-VL2-VH2-VH1; VH1-VH2-VL2-VL1; VL1-L1-VL2-L2-VH2-L3-VH1; VH1-L1-VH2-L2-VL2-L3-VL1; VL1-VL2-VH2-VH1-Fc; VH1-VH2-VL2-VL1-Fc; VL1-L1-VL2-L2-VH2-L3-VH1-Fc; VH1-L1-VH2-L2-VL2-L3-VL1-Fc; VL1-L1-VL2-L2-VH2-L3-VH1-L4-Fc; VH1-L1-VH2-L2-VL2-L3-VL1-L4-Fc; VL1-VL2-VH2-VH1-CH1; VH1-VH2-VL2-VL1-CH1; VL1-VL2-VH2-VH1-CL; VH1-VH2-VL2-VL1-CL; VL1-VL2-VH2-VH1-CH1-CL; VH1-VH2-VL2-VL1-CH1-CL; VL1-VL2-VH2-VH1-CL-CH1; VH1-VH2-VL2-VL1-CL-CH1; VL1-L1-VL2-L2-VH2-L3-VH1-L4-CH1; VH1-L1-VH2-L2-VL2-L3-VL1-L4-CH1; VL1-L1-VL2-L2-VH2-L3-VH1-L4-CL; VH1-L1-VH2-L2-VL2-L3-VL1-L4-CL; VL1-L1-VL2-L2-VH2-L3-VH1-L4-CH1-L5-CL; VH1-L1-VH2-L2-VL2-L3-VL1-L4-CH1-L5-CL; VL1-L1-VL2-L2-VH2-L3-VH1-L4-CL-L5-CH1; VH1-L1-VH2-L2-VL2-L3-VL1-L4-CL-L5-CH1; VL1-VL2-VH2-VH1-CH1-Fc; VH1-VH2-VL2-VL1-CH1-Fc; VL1-VL2-VH2-VH1-CL-Fc; VH1-VH2-VL2-VL1-CL-Fc; VL1-VL2-VH2-VH1-CH1-CL-Fc; VH1-VH2-VL2-VL1-CH1-CL-Fc; VL1-VL2-VH2-VH1-CL-CH1-Fc; VH1-VH2-VL2-VL1-CL-CH1-Fc; VL1-L1-VL2-L2-VH2-L3-VH1-L4-CH1-Fc; VH1-L1-VH2-L2-VL2-L3-VL1-L4-CH1-Fc; VL1-L1-VL2-L2-VH2-L3- VH1-L4-CL-Fc; VH1-L1-VH2-L2-VL2-L3-VL1-L4-CL-Fc; VL1-L1-VL2-L2-VH2-L3-VH1-L4-CH1-L5-CL-Fc; VH1-L1-VH2-L2-VL2-L3-VL1-L4-CH1-L5-CL-Fc; VL1-L1-VL2-L2-VH2-L3-VH1-L4-CL-L5-CH1-Fc; VH1-L1-VH2-L2-VL2-L3-VL1-L4-CL-L5-CH1-Fc; VL1-L1-VL2-L2-VH2-L3-VH1-L4-CH1-L5-Fc; VH1-L1-VH2-L2-VL2-L3-VL1-L4-CH1-L5-Fc; VL1-L1-VL2-L2-VH2-L3-VH1-L4-CL-L5-Fc; VH1-L1-VH2-L2-VL2-L3-VL1-L4-CL-L5-Fc; VL1-L1-VL2-L2-VH2-L3-VH1-L4-CH1-L5-CL-L6-Fc; VH1-L1-VH2-L2-VL2-L3-VL1-L4-CH1-L5-CL-L6-Fc; VL1-L1-VL2-L2-VH2-L3-VH1-L4-CL-L5-CH1-L6-Fc; or VH1-L1-VH2-L2-VL2-L3-VL1-L4-CL-L5-CH1-L6-Fc. In some aspects, the first polypeptide has a structure represented by VH1-VH2-VL2-VL1 and the second polypeptide has a structure represented by VL1-VL2-VH2-VH1; VH1-VH2-VL2-VL1; VL1-L1-VL2-L2-VH2-L3-VH1; VH1-L1-VH2-L2-VL2-L3-VL1; VL1-VL2-VH2-VH1-Fc; VH1-VH2-VL2-VL1-Fc; VL1-L1-VL2-L2-VH2-L3-VH1-Fc; VH1-L1-VH2-L2-VL2-L3-VL1-Fc; VL1-L1-VL2-L2-VH2-L3-VH1-L4-Fc; VH1-L1-VH2-L2-VL2-L3-VL1-L4-Fc; VL1-VL2-VH2-VH1-CH1; VH1-VH2-VL2-VL1-CH1; VL1-VL2-VH2-VH1-CL; VH1-VH2-VL2-VL1-CL; VL1-VL2-VH2-VH1-CH1-CL; VH1-VH2-VL2-VL1-CH1-CL; VL1-VL2-VH2-VH1-CL-CH1; VH1-VH2-VL2-VL1-CL-CH1; VL1-L1-VL2-L2-VH2-L3-VH1-L4-CH1; VH1-L1-VH2-L2-VL2-L3-VL1-L4-CH1; VL1-L1-VL2-L2-VH2-L3-VH1-L4-CL; VH1-L1- VH2-L2-VL2-L3-VL1-L4-CL; VL1-L1-VL2-L2-VH2-L3-VH1-L4-CH1-L5-CL; VH1-L1-VH2-L2-VL2-L3-VL1-L4-CH1- L5-CL; VL1-L1-VL2-L2-VH2-L3-VH1-L4-CL-L5-CH1; VH1-L1-VH2-L2-VL2-L3-VL1-L4-CL-L5-CH1; VL1-VL2-VH2-VH1-CH1-Fc; VH1-VH2-VL2-VL1-CH1-Fc; VL1-VL2-VH2-VH1-CL-Fc; VH1-VH2-VL2-VL1-CL-Fc; VL1-VL2-VH2-VH1-CH1-CL-Fc; VH1-VH2-VL2-VL1-CH1-CL-Fc; VL1-VL2-VH2-VH1-CL-CH1-Fc; VH1-VH2-VL2-VL1-CL-CH1-Fc; VL1-L1-VL2-L2-VH2-L3-VH1-L4-CH1-Fc; VH1-L1-VH2-L2-VL2-L3-VL1-L4-CH1-Fc; VL1-L1-VL2-L2-VH2-L3-VH1-L4-CL-Fc; VH1-L1-VH2-L2-VL2-L3-VL1-L4-CL-Fc; VL1-L1-VL2-L2-VH2-L3-VH1-L4-CH1-L5-CL-Fc; VH1-L1-VH2-L2-VL2-L3-VL1-L4-CH1-L5-CL-Fc; VL1-L1-VL2-L2-VH2-L3-VH1-L4-CL-L5-CH1-Fc; VH1-L1-VH2-L2-VL2-L3-VL1-L4-CL-L5-CH1-Fc; VL1-L1-VL2-L2-VH2-L3-VH1-L4-CH1-L5-Fc; VH1-L1-VH2-L2-VL2-L3-VL1-L4-CH1-L5-Fc; VL1-L1-VL2-L2-VH2-L3-VH1-L4-CL-L5-Fc; VH1-L1-VH2-L2-VL2-L3-VL1-L4-CL-L5-Fc; VL1-L1-VL2-L2-VH2-L3-VH1-L4-CH1-L5-CL-L6-Fc; VH1-L1-VH2-L2-VL2-L3-VL1-L4-CH1-L5-CL-L6-Fc; VL1-L1-VL2-L2-VH2-L3-VH1-L4-CL-L5-CH1-L6-Fc; or VH1-L1-VH2-L2-VL2-L3-VL1-L4-CL-L5-CH1-L6-Fc. In some aspects, the first polypeptide has a structure represented by VL1-L1-VL2-L2-VH2-L3-VH1 and the second polypeptide has a structure represented by VL1-VL2-VH2-VH1; VH1-VH2-VL2-VL1; VL1-L1-VL2-L2-VH2-L3-VH1; VH1-L1-VH2-L2-VL2-L3-VL1; VL1-VL2-VH2-VH1-Fc; VH1-VH2-VL2-VL1-Fc; VL1-L1-VL2-L2-VH2-L3-VH1-Fc; VH1-L1-VH2-L2-VL2-L3-VL1-Fc; VL1-L1-VL2-L2-VH2-L3-VH1-L4-Fc; VH1-L1-VH2-L2-VL2-L3-VL1-L4-Fc; VL1-VL2-VH2-VH1-CH1; VH1-VH2-VL2-VL1-CH1; VL1-VL2-VH2-VH1-CL; VH1-VH2-VL2-VL1-CL; VL1-VL2-VH2-VH1-CH1-CL; VH1-VH2-VL2-VL1-CH1-CL; VL1-VL2-VH2-VH1-CL-CH1; VH1-VH2-VL2-VL1-CL-CH1; VL1-L1-VL2-L2-VH2-L3-VH1-L4-CH1; VH1-L1-VH2-L2-VL2-L3-VL1-L4-CH1; VL1-L1-VL2- L2-VH2-L3-VH1-L4-CL; VH1-L1-VH2-L2-VL2-L3-VL1-L4-CL; VL1-L1-VL2-L2-VH2-L3-VH1-L4-CH1-L5-CL; VH1-L1-VH2-L2-VL2-L3-VL1-L4-CH1-L5-CL; VL1-L1-VL2-L2-VH2-L3-VH1-L4-CL-L5-CH1; VH1-L1-VH2-L2- VL2-L3-VL1-L4-CL-L5-CH1; VL1-VL2-VH2-VH1-CH1-Fc; VH1-VH2-VL2-VL1-CH1-Fc; VL1-VL2-VH2-VH1-CL-Fc; VH1-VH2-VL2-VL1-CL-Fc; VL1-VL2-VH2-VH1-CH1-CL-Fc; VH1-VH2-VL2-VL1-CH1-CL-Fc; VL1-VL2-VH2-VH1-CL-CH1-Fc; VH1-VH2-VL2-VL1-CL-CH1-Fc; VL1-L1-VL2-L2-VH2-L3-VH1-L4-CH1-Fc; VH1-L1-VH2-L2-VL2-L3-VL1-L4-CH1-Fc; VL1-L1-VL2-L2-VH2-L3-VH1-L4-CL-Fc; VH1-L1-VH2-L2-VL2-L3-VL1-L4-CL-Fc; VL1-L1-VL2-L2-VH2-L3-VH1-L4-CH1-L5-CL-Fc; VH1-L1-VH2-L2-VL2-L3-VL1-L4-CH1-L5-CL-Fc; VL1-L1-VL2-L2-VH2-L3-VH1-L4-CL-L5-CH1-Fc; VH1-L1-VH2-L2-VL2-L3-VL1-L4-CL-L5-CH1-Fc; VL1-L1-VL2-L2-VH2-L3-VH1-L4-CH1-L5-Fc; VH1-L1-VH2-L2-VL2-L3-VL1-L4-CH1-L5-Fc; VL1-L1-VL2-L2-VH2-L3-VH1- L4-CL-L5-Fc; VH1-L1-VH2-L2-VL2-L3-VL1-L4-CL-L5-Fc; VL1-L1-VL2-L2-VH2-L3-VH1-L4-CH1-L5-CL-L6-Fc; VH1-L1-VH2-L2-VL2-L3-VL1-L4-CH1-L5-CL-L6-Fc; VL1-L1-VL2-L2-VH2-L3-VH1-L4-CL-L5-CH1-L6-Fc; or VH1-L1-VH2-L2-VL2-L3-VL1-L4-CL-L5-CH1-L6-Fc. In some aspects, the first polypeptide has a structure represented by VH1-L1-VH2-L2-VL2-L3-VL1 and the second polypeptide has a structure represented by VL1-VL2-VH2-VH1; VH1-VH2-VL2-VL1; VL1-L1-VL2-L2-VH2-L3-VH1; VH1-L1-VH2-L2-VL2-L3-VL1; VL1-VL2-VH2-VH1-Fc; VH1-VH2-VL2-VL1-Fc; VL1-L1-VL2-L2-VH2-L3-VH1-Fc; VH1-L1-VH2-L2-VL2-L3-VL1-Fc; VL1-L1-VL2-L2-VH2-L3-VH1-L4-Fc; VH1-L1-VH2-L2-VL2-L3-VL1-L4-Fc; VL1-VL2-VH2-VH1-CH1; VH1-VH2-VL2-VL1-CH1; VL1-VL2-VH2-VH1-CL; VH1-VH2-VL2-VL1-CL; VL1-VL2-VH2-VH1-CH1-CL; VH1-VH2-VL2-VL1-CH1-CL; VL1-VL2-VH2-VH1-CL-CH1; VH1-VH2-VL2-VL1-CL-CH1; VL1-L1-VL2-L2-VH2-L3-VH1-L4-CH1; VH1-L1-VH2-L2-VL2-L3-VL1-L4-CH1; VL1-L1-VL2-L2-VH2-L3-VH1-L4-CL; VH1-L1-VH2-L2-VL2-L3-VL1-L4-CL; VL1-L1-VL2-L2-VH2-L3-VH1-L4-CH1-L5-CL; VH1-L1-VH2-L2-VL2-L3-VL1-L4-CH1-L5-CL; VL1-L1-VL2-L2-VH2-L3-VH1-L4-CL-L5-CH1; VH1-L1-VH2-L2-VL2-L3-VL1-L4-CL-L5-CH1; VL1-VL2-VH2-VH1-CH1-Fc; VH1-VH2-VL2-VL1-CH1-Fc; VL1-VL2-VH2-VH1-CL-Fc; VH1-VH2-VL2-VL1-CL-Fc; VL1-VL2-VH2-VH1-CH1-CL-Fc; VH1-VH2-VL2-VL1-CH1-CL-Fc; VL1-VL2-VH2-VH1-CL-CH1-Fc; VH1-VH2-VL2-VL1-CL-CH1-Fc; VL1-L1-VL2-L2-VH2-L3-VH1-L4-CH1-Fc; VH1-L1-VH2-L2-VL2-L3-VL1-L4-CH1-Fc; VL1-L1-VL2-L2-VH2-L3- VH1-L4-CL-Fc; VH1-L1-VH2-L2-VL2-L3-VL1-L4-CL-Fc; VL1-L1-VL2-L2-VH2-L3-VH1-L4-CH1-L5-CL-Fc; VH1-L1-VH2-L2-VL2-L3-VL1-L4-CH1-L5-CL-Fc; VL1-L1-VL2-L2-VH2-L3-VH1-L4-CL-L5-CH1-Fc; VH1-L1-VH2-L2-VL2-L3-VL1-L4-CL-L5-CH1-Fc; VL1-L1-VL2-L2-VH2-L3-VH1-L4-CH1-L5-Fc; VH1-L1-VH2-L2-VL2-L3-VL1-L4-CH1-L5-Fc; VL1-L1-VL2-L2-VH2-L3-VH1-L4-CL-L5-Fc; VH1-L1-VH2-L2-VL2-L3-VL1-L4-CL-L5-Fc; VL1-L1-VL2-L2-VH2-L3-VH1-L4-CH1-L5-CL-L6-Fc; VH1-L1-VH2-L2-VL2-L3-VL1-L4-CH1-L5-CL-L6-Fc; VL1-L1-VL2-L2-VH2-L3-VH1-L4-CL-L5-CH1-L6-Fc; or VH1-L1-VH2-L2-VL2-L3-VL1-L4-CL-L5-CH1-L6-Fc. In some aspects, the first polypeptide has a structure represented by VL1-VL2-VH2-VH1-Fc and the second polypeptide has a structure represented by VL1-VL2-VH2-VH1; VH1-VH2-VL2-VL1; VL1-L1-VL2-L2-VH2-L3-VH1; VH1-L1-VH2-L2-VL2-L3-VL1; VL1-VL2-VH2-VH1-Fc; VH1-VH2-VL2-VL1-Fc; VL1-L1-VL2-L2-VH2-L3-VH1-Fc; VH1-L1-VH2-L2-VL2-L3-VL1-Fc; VL1-L1-VL2-L2-VH2-L3-VH1-L4-Fc; VH1-L1-VH2-L2-VL2-L3-VL1-L4-Fc; VL1-VL2-VH2-VH1-CH1; VH1-VH2-VL2-VL1-CH1; VL1-VL2-VH2-VH1-CL; VH1-VH2-VL2-VL1-CL; VL1-VL2-VH2-VH1-CH1-CL; VH1-VH2-VL2-VL1-CH1-CL; VL1-VL2-VH2-VH1-CL-CH1; VH1-VH2-VL2-VL1-CL-CH1; VL1-L1-VL2-L2-VH2-L3-VH1-L4-CH1; VH1-L1-VH2-L2-VL2-L3-VL1-L4-CH1; VL1-L1-VL2-L2-VH2-L3-VH1-L4-CL; VH1-L1- VH2-L2-VL2-L3-VL1-L4-CL; VL1-L1-VL2-L2-VH2-L3-VH1-L4-CH1-L5-CL; VH1-L1-VH2-L2-VL2-L3-VL1-L4-CH1- L5-CL; VL1-L1-VL2-L2-VH2-L3-VH1-L4-CL-L5-CH1; VH1-L1-VH2-L2-VL2-L3-VL1-L4-CL-L5-CH1; VL1-VL2-VH2-VH1-CH1-Fc; VH1-VH2-VL2-VL1-CH1-Fc; VL1-VL2-VH2-VH1-CL-Fc; VH1-VH2-VL2-VL1-CL-Fc; VL1-VL2-VH2-VH1-CH1-CL-Fc; VH1-VH2-VL2-VL1-CH1-CL-Fc; VL1-VL2-VH2-VH1-CL-CH1-Fc; VH1-VH2-VL2-VL1-CL-CH1-Fc; VL1-L1-VL2-L2-VH2-L3-VH1-L4-CH1-Fc; VH1-L1-VH2-L2-VL2-L3-VL1-L4-CH1-Fc; VL1-L1-VL2-L2-VH2-L3-VH1-L4-CL-Fc; VH1-L1-VH2-L2-VL2-L3-VL1-L4-CL-Fc; VL1-L1-VL2-L2-VH2-L3-VH1-L4-CH1-L5-CL-Fc; VH1-L1-VH2-L2-VL2-L3-VL1-L4-CH1-L5-CL-Fc; VL1-L1-VL2-L2-VH2-L3-VH1-L4-CL-L5-CH1-Fc; VH1-L1-VH2-L2-VL2-L3-VL1-L4-CL-L5-CH1-Fc; VL1-L1-VL2-L2-VH2-L3-VH1-L4-CH1-L5-Fc; VH1-L1-VH2-L2-VL2-L3-VL1-L4-CH1-L5-Fc; VL1-L1-VL2-L2-VH2-L3-VH1-L4-CL-L5-Fc; VH1-L1-VH2-L2-VL2-L3-VL1-L4-CL-L5-Fc; VL1-L1-VL2-L2-VH2-L3-VH1-L4-CH1-L5-CL-L6-Fc; VH1-L1-VH2-L2-VL2-L3-VL1-L4-CH1-L5-CL-L6-Fc; VL1-L1-VL2-L2-VH2-L3-VH1-L4-CL-L5-CH1-L6-Fc; or VH1-L1-VH2-L2-VL2-L3-VL1-L4-CL-L5-CH1-L6-Fc. In some aspects, the first polypeptide has a structure represented by VH1-VH2-VL2-VL1-Fc and the second polypeptide has a structure represented by VL1-VL2-VH2-VH1; VH1-VH2-VL2-VL1; VL1-L1-VL2-L2-VH2-L3-VH1; VH1-L1-VH2-L2-VL2-L3-VL1; VL1-VL2-VH2-VH1-Fc; VH1-VH2-VL2-VL1-Fc; VL1-L1-VL2-L2-VH2-L3-VH1-Fc; VH1-L1-VH2-L2-VL2-L3-VL1-Fc; VL1-L1-VL2-L2-VH2-L3-VH1-L4-Fc; VH1-L1-VH2-L2-VL2-L3-VL1-L4-Fc; VL1-VL2-VH2-VH1-CH1; VH1-VH2-VL2-VL1-CH1; VL1-VL2-VH2-VH1-CL; VH1-VH2-VL2-VL1-CL; VL1-VL2-VH2-VH1-CH1-CL; VH1-VH2-VL2-VL1-CH1-CL; VL1-VL2-VH2-VH1-CL-CH1; VH1-VH2-VL2-VL1-CL-CH1; VL1-L1-VL2-L2-VH2-L3-VH1-L4-CH1; VH1-L1-VH2-L2-VL2-L3-VL1-L4-CH1; VL1-L1-VL2-L2-VH2-L3-VH1-L4-CL; VH1-L1-VH2-L2-VL2-L3-VL1-L4-CL; VL1-L1-VL2-L2-VH2-L3-VH1-L4-CH1-L5-CL; VH1-L1-VH2-L2-VL2-L3-VL1-L4-CH1-L5-CL; VL1-L1-VL2-L2-VH2-L3-VH1-L4-CL-L5-CH1; VH1-L1-VH2-L2-VL2-L3-VL1- L4-CL-L5-CH1; VL1-VL2-VH2-VH1-CH1-Fc; VH1-VH2-VL2-VL1-CH1-Fc; VL1-VL2-VH2-VH1-CL-Fc; VH1-VH2-VL2-VL1-CL-Fc; VL1-VL2-VH2-VH1-CH1-CL-Fc; VH1-VH2-VL2-VL1-CH1-CL-Fc; VL1-VL2-VH2-VH1-CL-CH1-Fc; VH1-VH2-VL2-VL1-CL-CH1-Fc; VL1-L1-VL2-L2-VH2-L3-VH1-L4-CH1-Fc; VH1-L1-VH2-L2-VL2-L3-VL1-L4-CH1-Fc; VL1-L1-VL2-L2-VH2-L3-VH1-L4-CL-Fc; VH1-L1-VH2-L2-VL2-L3-VL1-L4-CL-Fc; VL1-L1-VL2-L2-VH2-L3-VH1-L4-CH1-L5-CL-Fc; VH1-L1-VH2-L2-VL2-L3-VL1-L4-CH1-L5-CL-Fc; VL1-L1-VL2-L2-VH2-L3-VH1-L4-CL-L5-CH1-Fc; VH1-L1-VH2-L2-VL2-L3-VL1-L4-CL-L5-CH1-Fc; VL1-L1-VL2-L2-VH2-L3-VH1-L4-CH1-L5-Fc; VH1-L1-VH2-L2-VL2-L3-VL1-L4-CH1-L5-Fc; VL1-L1-VL2-L2-VH2-L3-VH1-L4-CL-L5-Fc; VH1-L1-VH2-L2-VL2-L3-VL1-L4-CL-L5-Fc; VL1-L1-VL2-L2-VH2-L3-VH1-L4-CH1-L5-CL-L6-Fc; VH1-L1-VH2-L2-VL2-L3-VL1-L4-CH1-L5-CL-L6-Fc; VL1-L1-VL2-L2-VH2-L3-VH1-L4-CL-L5-CH1-L6-Fc; or VH1-L1-VH2-L2-VL2-L3-VL1-L4-CL-L5-CH1-L6-Fc. In some aspects, the first polypeptide has a structure represented by VL1-L1-VL2-L2-VH2-L3-VH1-Fc and the second polypeptide has a structure represented by VL1-VL2-VH2-VH1; VH1-VH2-VL2-VL1; VL1-L1-VL2-L2-VH2-L3-VH1; VH1-L1-VH2-L2-VL2-L3-VL1; VL1-VL2-VH2-VH1-Fc; VH1-VH2-VL2-VL1-Fc; VL1-L1-VL2-L2-VH2-L3-VH1-Fc; VH1-L1-VH2-L2-VL2-L3-VL1-Fc; VL1-L1-VL2-L2-VH2-L3-VH1-L4-Fc; VH1-L1-VH2-L2-VL2-L3-VL1-L4-Fc; VL1-VL2-VH2-VH1-CH1; VH1-VH2-VL2-VL1-CH1; VL1-VL2-VH2-VH1-CL; VH1-VH2-VL2-VL1-CL; VL1-VL2-VH2-VH1-CH1-CL; VH1-VH2-VL2-VL1-CH1-CL; VL1-VL2-VH2-VH1-CL-CH1; VH1-VH2-VL2-VL1-CL-CH1; VL1-L1-VL2-L2-VH2-L3-VH1-L4-CH1; VH1-L1-VH2-L2-VL2-L3-VL1-L4-CH1; VL1-L1-VL2-L2-VH2-L3-VH1-L4-CL; VH1-L1-VH2-L2-VL2-L3-VL1-L4-CL; VL1-L1-VL2-L2-VH2- L3-VH1-L4-CH1-L5-CL; VH1-L1-VH2-L2-VL2-L3-VL1-L4-CH1-L5-CL; VL1-L1-VL2-L2-VH2-L3-VH1-L4-CL-L5-CH1; VH1-L1-VH2-L2-VL2-L3-VL1-L4-CL-L5-CH1; VL1-VL2-VH2-VH1-CH1-Fc; VH1-VH2-VL2-VL1-CH1-Fc; VL1-VL2-VH2-VH1-CL-Fc; VH1-VH2-VL2-VL1-CL-Fc; VL1-VL2-VH2-VH1-CH1-CL-Fc; VH1-VH2-VL2-VL1-CH1-CL-Fc; VL1-VL2-VH2-VH1-CL-CH1-Fc; VH1-VH2-VL2-VL1-CL-CH1-Fc; VL1-L1-VL2-L2-VH2-L3-VH1-L4-CH1-Fc; VH1-L1-VH2-L2-VL2-L3-VL1-L4-CH1-Fc; VL1-L1-VL2-L2-VH2-L3-VH1-L4-CL-Fc; VH1-L1-VH2-L2-VL2-L3-VL1-L4-CL-Fc; VL1-L1-VL2-L2-VH2-L3-VH1-L4-CH1-L5-CL-Fc; VH1-L1-VH2-L2-VL2-L3-VL1-L4-CH1-L5-CL-Fc; VL1-L1-VL2-L2-VH2-L3-VH1-L4-CL-L5-CH1-Fc; VH1-L1-VH2-L2-VL2-L3-VL1-L4-CL-L5-CH1-Fc; VL1-L1-VL2-L2-VH2-L3-VH1-L4-CH1-L5-Fc; VH1-L1-VH2-L2-VL2-L3-VL1-L4-CH1-L5-Fc; VL1-L1-VL2-L2-VH2-L3-VH1-L4-CL-L5-Fc; VH1-L1-VH2-L2-VL2-L3-VL1-L4-CL-L5-Fc; VL1-L1-VL2-L2-VH2-L3-VH1-L4-CH1-L5-CL-L6-Fc; VH1-L1-VH2-L2-VL2-L3-VL1-L4-CH1-L5-CL-L6-Fc; VL1-L1-VL2-L2-VH2-L3-VH1-L4-CL-L5-CH1-L6-Fc; or VH1-L1-VH2-L2-VL2-L3-VL1-L4-CL-L5-CH1-L6-Fc. In some aspects, the first polypeptide has a structure represented by VH1-L1-VH2-L2-VL2-L3-VL1-Fc and the second polypeptide has a structure represented by VL1-VL2-VH2-VH1; VH1-VH2-VL2-VL1; VL1-L1-VL2-L2-VH2-L3-VH1; VH1-L1-VH2-L2-VL2-L3-VL1; VL1-VL2-VH2-VH1-Fc; VH1-VH2-VL2-VL1-Fc; VL1-L1-VL2-L2-VH2-L3-VH1-Fc; VH1-L1-VH2-L2-VL2-L3-VL1-Fc; VL1-L1-VL2-L2-VH2-L3-VH1-L4-Fc; VH1-L1-VH2-L2-VL2-L3-VL1-L4-Fc; VL1-VL2-VH2-VH1-CH1; VH1-VH2-VL2-VL1-CH1; VL1-VL2-VH2-VH1-CL; VH1-VH2-VL2-VL1-CL; VL1-VL2-VH2-VH1-CH1-CL; VH1-VH2-VL2-VL1-CH1-CL; VL1-VL2-VH2-VH1-CL-CH1; VH1-VH2-VL2-VL1-CL-CH1; VL1-L1-VL2-L2-VH2-L3-VH1-L4-CH1; VH1-L1-VH2-L2-VL2-L3-VL1-L4-CH1; VL1-L1-VL2-L2-VH2-L3-VH1-L4-CL; VH1-L1-VH2-L2-VL2- L3-VL1-L4-CL; VL1-L1-VL2-L2-VH2-L3-VH1-L4-CH1-L5-CL; VH1-L1-VH2-L2-VL2-L3-VL1-L4-CH1-L5-CL; VL1-L1-VL2-L2-VH2-L3-VH1-L4-CL-L5-CH1; VH1-L1-VH2-L2-VL2-L3-VL1-L4-CL-L5-CH1; VL1-VL2-VH2-VH1-CH1-Fc; VH1-VH2-VL2-VL1-CH1-Fc; VL1-VL2-VH2-VH1-CL-Fc; VH1-VH2-VL2-VL1-CL-Fc; VL1-VL2-VH2-VH1-CH1-CL-Fc; VH1-VH2-VL2-VL1-CH1-CL-Fc; VL1-VL2-VH2-VH1-CL-CH1-Fc; VH1-VH2-VL2-VL1-CL-CH1-Fc; VL1-L1-VL2-L2-VH2-L3-VH1-L4-CH1-Fc; VH1-L1-VH2-L2-VL2-L3-VL1-L4-CH1-Fc; VL1-L1-VL2-L2-VH2-L3-VH1-L4-CL-Fc; VH1-L1-VH2-L2-VL2-L3-VL1-L4-CL-Fc; VL1-L1-VL2-L2-VH2-L3-VH1-L4-CH1-L5-CL- Fc; VH1-L1-VH2-L2-VL2-L3-VL1-L4-CH1-L5-CL-Fc; VL1-L1-VL2-L2-VH2-L3-VH1-L4-CL-L5-CH1-Fc; VH1-L1-VH2-L2-VL2-L3-VL1-L4-CL-L5-CH1-Fc; VL1-L1-VL2-L2-VH2-L3-VH1-L4-CH1-L5-Fc; VH1-L1-VH2-L2-VL2-L3-VL1-L4-CH1-L5-Fc; VL1-L1-VL2-L2-VH2-L3-VH1-L4-CL-L5-Fc; VH1-L1-VH2-L2-VL2-L3-VL1-L4-CL-L5-Fc; VL1-L1-VL2-L2-VH2-L3-VH1-L4-CH1-L5-CL-L6-Fc; VH1-L1-VH2-L2-VL2-L3-VL1-L4-CH1-L5-CL-L6-Fc; VL1-L1-VL2-L2-VH2-L3-VH1-L4-CL-L5-CH1-L6-Fc; or VH1-L1-VH2-L2-VL2-L3-VL1-L4-CL-L5-CH1-L6-Fc. In some aspects, the first polypeptide has a structure represented by VL1-L1-VL2-L2-VH2-L3-VH1-L4-Fc and the second polypeptide has a structure represented by VL1-VL2-VH2-VH1; VH1-VH2-VL2-VL1; VL1-L1-VL2-L2-VH2-L3-VH1; VH1-L1-VH2-L2-VL2-L3-VL1; VL1-VL2-VH2-VH1-Fc; VH1-VH2-VL2-VL1-Fc; VL1-L1-VL2-L2-VH2-L3-VH1-Fc; VH1-L1-VH2-L2-VL2-L3-VL1-Fc; VL1-L1-VL2-L2-VH2-L3-VH1-L4-Fc; VH1-L1-VH2-L2-VL2-L3-VL1-L4-Fc; VL1-VL2-VH2-VH1-CH1; VH1-VH2-VL2-VL1-CH1; VL1-VL2-VH2-VH1-CL; VH1-VH2-VL2-VL1-CL; VL1-VL2-VH2-VH1-CH1-CL; VH1-VH2-VL2-VL1-CH1-CL; VL1-VL2-VH2-VH1-CL-CH1; VH1-VH2-VL2-VL1-CL-CH1; VL1-L1-VL2-L2-VH2-L3-VH1-L4-CH1; VH1-L1-VH2-L2-VL2-L3-VL1-L4-CH1; VL1-L1-VL2-L2-VH2-L3-VH1-L4-CL; VH1-L1-VH2-L2-VL2-L3-VL1-L4-CL; VL1-L1-VL2-L2-VH2-L3-VH1-L4-CH1-L5-CL; VH1-L1-VH2-L2-VL2-L3-VL1-L4-CH1-L5-CL; VL1-L1-VL2-L2-VH2-L3-VH1-L4-CL-L5-CH1; VH1-L1-VH2-L2-VL2-L3-VL1- L4-CL-L5-CH1; VL1-VL2-VH2-VH1-CH1-Fc; VH1-VH2-VL2-VL1-CH1-Fc; VL1-VL2-VH2-VH1-CL-Fc; VH1-VH2-VL2-VL1-CL-Fc; VL1-VL2-VH2-VH1-CH1-CL-Fc; VH1-VH2-VL2-VL1-CH1-CL-Fc; VL1-VL2-VH2-VH1-CL-CH1-Fc; VH1-VH2-VL2-VL1-CL-CH1-Fc; VL1-L1-VL2-L2-VH2-L3-VH1-L4-CH1-Fc; VH1-L1-VH2-L2-VL2-L3-VL1-L4-CH1-Fc; VL1-L1-VL2-L2-VH2-L3-VH1-L4-CL-Fc; VH1-L1-VH2-L2-VL2-L3-VL1-L4-CL-Fc; VL1-L1-VL2-L2-VH2-L3-VH1-L4-CH1-L5-CL-Fc; VH1-L1-VH2-L2-VL2-L3-VL1-L4-CH1-L5-CL-Fc; VL1-L1-VL2-L2-VH2-L3-VH1-L4-CL-L5-CH1-Fc; VH1-L1-VH2-L2-VL2-L3-VL1-L4-CL-L5-CH1-Fc; VL1-L1-VL2-L2-VH2-L3-VH1-L4-CH1-L5-Fc; VH1-L1-VH2-L2-VL2-L3-VL1-L4-CH1-L5-Fc; VL1-L1-VL2-L2-VH2-L3-VH1-L4-CL-L5-Fc; VH1-L1-VH2-L2-VL2-L3-VL1-L4-CL-L5-Fc; VL1-L1-VL2-L2-VH2-L3-VH1-L4-CH1-L5-CL-L6-Fc; VH1-L1-VH2-L2-VL2-L3-VL1-L4-CH1-L5-CL-L6-Fc; VL1-L1-VL2-L2-VH2-L3-VH1-L4-CL-L5-CH1-L6-Fc; or VH1-L1-VH2-L2-VL2-L3-VL1-L4-CL-L5-CH1-L6-Fc. In some aspects, the first polypeptide has a structure represented by VH1-L1-VH2-L2-VL2-L3-VL1-L4-Fc and the second polypeptide has a structure represented by VL1-VL2-VH2-VH1; VH1-VH2-VL2-VL1; VL1-L1-VL2-L2-VH2-L3-VH1; VH1-L1-VH2-L2-VL2-L3-VL1; VL1-VL2-VH2-VH1-Fc; VH1-VH2-VL2-VL1-Fc; VL1-L1-VL2-L2-VH2-L3-VH1-Fc; VH1-L1-VH2-L2-VL2-L3-VL1-Fc; VL1-L1-VL2-L2-VH2-L3-VH1-L4-Fc; VH1-L1-VH2-L2-VL2-L3-VL1-L4-Fc; VL1-VL2-VH2-VH1-CH1; VH1-VH2-VL2-VL1-CH1; VL1-VL2-VH2-VH1-CL; VH1-VH2-VL2-VL1-CL; VL1-VL2-VH2-VH1-CH1-CL; VH1-VH2-VL2-VL1-CH1-CL; VL1-VL2-VH2-VH1-CL-CH1; VH1-VH2-VL2-VL1-CL-CH1; VL1-L1-VL2-L2-VH2-L3-VH1-L4-CH1; VH1-L1-VH2-L2-VL2-L3-VL1-L4-CH1; VL1-L1-VL2-L2-VH2-L3-VH1-L4-CL; VH1-L1-VH2-L2-VL2-L3-VL1-L4-CL; VL1-L1-VL2-L2- VH2-L3-VH1-L4-CH1-L5-CL; VH1-L1-VH2-L2-VL2-L3-VL1-L4-CH1-L5-CL; VL1-L1-VL2-L2-VH2-L3-VH1-L4- CL-L5-CH1; VH1-L1-VH2-L2-VL2-L3-VL1-L4-CL-L5-CH1; VL1-VL2-VH2-VH1-CH1-Fc; VH1-VH2-VL2-VL1-CH1-Fc; VL1-VL2-VH2-VH1-CL-Fc; VH1-VH2-VL2-VL1-CL-Fc; VL1-VL2-VH2-VH1-CH1-CL-Fc; VH1-VH2-VL2-VL1-CH1-CL-Fc; VL1-VL2-VH2-VH1-CL-CH1-Fc; VH1-VH2-VL2-VL1-CL-CH1-Fc; VL1-L1-VL2-L2-VH2-L3-VH1-L4-CH1-Fc; VH1-L1-VH2-L2-VL2-L3-VL1-L4-CH1-Fc; VL1-L1-VL2-L2-VH2-L3-VH1-L4-CL-Fc; VH1-L1-VH2-L2-VL2-L3-VL1-L4-CL-Fc; VL1-L1-VL2-L2-VH2-L3-VH1-L4-CH1-L5-CL-Fc; VH1-L1-VH2-L2-VL2-L3-VL1-L4-CH1-L5-CL-Fc; VL1-L1-VL2-L2-VH2-L3-VH1-L4-CL-L5-CH1-Fc; VH1-L1-VH2-L2-VL2-L3-VL1-L4-CL-L5-CH1-Fc; VL1-L1-VL2-L2-VH2-L3-VH1-L4-CH1-L5-Fc; VH1-L1-VH2-L2-VL2-L3-VL1-L4-CH1-L5-Fc; VL1-L1-VL2-L2-VH2-L3-VH1-L4-CL-L5-Fc; VH1-L1-VH2-L2-VL2-L3-VL1-L4-CL-L5-Fc; VL1-L1-VL2-L2-VH2-L3-VH1-L4-CH1-L5-CL-L6-Fc; VH1-L1-VH2-L2-VL2-L3-VL1-L4-CH1-L5-CL-L6-Fc; VL1-L1-VL2-L2-VH2-L3-VH1-L4-CL-L5-CH1-L6-Fc; or VH1-L1-VH2-L2-VL2-L3-VL1-L4-CL-L5-CH1-L6-Fc. In some aspects, the first polypeptide has a structure represented by VL1-VL2-VH2-VH1-CH1 and the second polypeptide has a structure represented by VL1-VL2-VH2-VH1; VH1-VH2-VL2-VL1; VL1-L1-VL2-L2-VH2-L3-VH1; VH1-L1-VH2-L2-VL2-L3-VL1; VL1-VL2-VH2-VH1-Fc; VH1-VH2-VL2-VL1-Fc; VL1-L1-VL2-L2-VH2-L3-VH1-Fc; VH1-L1-VH2-L2-VL2-L3-VL1-Fc; VL1-L1-VL2-L2-VH2-L3-VH1-L4-Fc; VH1-L1-VH2-L2-VL2-L3-VL1-L4-Fc; VL1-VL2-VH2-VH1-CH1; VH1-VH2-VL2-VL1-CH1; VL1-VL2-VH2-VH1-CL; VH1-VH2-VL2-VL1-CL; VL1-VL2-VH2-VH1-CH1-CL; VH1-VH2-VL2-VL1-CH1-CL; VL1-VL2-VH2-VH1-CL-CH1; VH1-VH2-VL2-VL1-CL-CH1; VL1-L1-VL2-L2-VH2-L3-VH1-L4-CH1; VH1-L1-VH2-L2-VL2-L3-VL1-L4-CH1; VL1-L1-VL2-L2-VH2-L3-VH1-L4-CL; VH1-L1-VH2-L2-VL2-L3-VL1-L4-CL; VL1-L1-VL2-L2-VH2-L3-VH1-L4-CH1-L5-CL; VH1-L1-VH2-L2-VL2-L3-VL1-L4-CH1-L5-CL; VL1-L1-VL2-L2-VH2-L3-VH1-L4-CL-L5-CH1; VH1-L1-VH2-L2-VL2-L3-VL1-L4-CL-L5-CH1; VL1-VL2-VH2-VH1-CH1-Fc; VH1-VH2-VL2-VL1-CH1-Fc; VL1-VL2-VH2-VH1-CL-Fc; VH1-VH2-VL2-VL1-CL-Fc; VL1-VL2-VH2-VH1-CH1-CL-Fc; VH1-VH2-VL2-VL1-CH1-CL-Fc; VL1-VL2-VH2-VH1-CL-CH1-Fc; VH1-VH2-VL2-VL1-CL-CH1-Fc; VL1-L1-VL2-L2-VH2-L3-VH1-L4-CH1-Fc; VH1-L1-VH2-L2-VL2-L3-VL1-L4-CH1-Fc; VL1-L1-VL2-L2-VH2-L3- VH1-L4-CL-Fc; VH1-L1-VH2-L2-VL2-L3-VL1-L4-CL-Fc; VL1-L1-VL2-L2-VH2-L3-VH1-L4-CH1-L5-CL-Fc; VH1-L1-VH2-L2-VL2-L3-VL1-L4-CH1-L5-CL-Fc; VL1-L1-VL2-L2-VH2-L3-VH1-L4-CL-L5-CH1-Fc; VH1-L1-VH2-L2-VL2-L3-VL1-L4-CL-L5-CH1-Fc; VL1-L1-VL2-L2-VH2-L3-VH1-L4-CH1-L5-Fc; VH1-L1-VH2-L2-VL2-L3-VL1-L4-CH1-L5-Fc; VL1-L1-VL2-L2-VH2-L3-VH1-L4-CL-L5-Fc; VH1-L1-VH2-L2-VL2-L3-VL1-L4-CL-L5-Fc; VL1-L1-VL2-L2-VH2-L3-VH1-L4-CH1-L5-CL-L6-Fc; VH1-L1-VH2-L2-VL2-L3-VL1-L4-CH1-L5-CL-L6-Fc; VL1-L1-VL2-L2-VH2-L3-VH1-L4-CL-L5-CH1-L6-Fc; or VH1-L1-VH2-L2-VL2-L3-VL1-L4-CL-L5-CH1-L6-Fc. In some aspects, the first polypeptide has a structure represented by VH1-VH2-VL2-VL1-CH1 and the second polypeptide has a structure represented by VL1-VL2-VH2-VH1; VH1-VH2-VL2-VL1; VL1-L1-VL2-L2-VH2-L3-VH1; VH1-L1-VH2-L2-VL2-L3-VL1; VL1-VL2-VH2-VH1-Fc; VH1-VH2-VL2-VL1-Fc; VL1-L1-VL2-L2-VH2-L3-VH1-Fc; VH1-L1-VH2-L2-VL2-L3-VL1-Fc; VL1-L1-VL2-L2-VH2-L3-VH1-L4-Fc; VH1-L1-VH2-L2-VL2-L3-VL1-L4-Fc; VL1-VL2-VH2-VH1-CH1; VH1-VH2-VL2-VL1-CH1; VL1-VL2-VH2-VH1-CL; VH1-VH2-VL2-VL1-CL; VL1-VL2-VH2-VH1-CH1-CL; VH1-VH2-VL2-VL1-CH1-CL; VL1-VL2-VH2-VH1-CL-CH1; VH1-VH2-VL2-VL1-CL-CH1; VL1-L1-VL2-L2-VH2-L3-VH1-L4-CH1; VH1-L1-VH2-L2-VL2-L3-VL1-L4-CH1; VL1-L1-VL2-L2-VH2-L3-VH1-L4-CL; VH1-L1- VH2-L2-VL2-L3-VL1-L4-CL; VL1-L1-VL2-L2-VH2-L3-VH1-L4-CH1-L5-CL; VH1-L1-VH2-L2-VL2-L3-VL1-L4-CH1- L5-CL; VL1-L1-VL2-L2-VH2-L3-VH1-L4-CL-L5-CH1; VH1-L1-VH2-L2-VL2-L3-VL1-L4-CL-L5-CH1; VL1-VL2-VH2-VH1-CH1-Fc; VH1-VH2-VL2-VL1-CH1-Fc; VL1-VL2-VH2-VH1-CL-Fc; VH1-VH2-VL2-VL1-CL-Fc; VL1-VL2-VH2-VH1-CH1-CL-Fc; VH1-VH2-VL2-VL1-CH1-CL-Fc; VL1-VL2-VH2-VH1-CL-CH1-Fc; VH1-VH2-VL2-VL1-CL-CH1-Fc; VL1-L1-VL2-L2-VH2-L3-VH1-L4-CH1-Fc; VH1-L1-VH2-L2-VL2-L3-VL1-L4-CH1-Fc; VL1-L1-VL2-L2-VH2-L3-VH1-L4-CL-Fc; VH1-L1-VH2-L2-VL2-L3-VL1-L4-CL-Fc; VL1-L1-VL2-L2-VH2-L3-VH1-L4-CH1-L5-CL-Fc; VH1-L1-VH2-L2-VL2-L3-VL1-L4-CH1-L5-CL-Fc; VL1-L1-VL2-L2-VH2-L3-VH1-L4-CL-L5-CH1-Fc; VH1-L1-VH2-L2-VL2-L3-VL1-L4-CL-L5-CH1-Fc; VL1-L1-VL2-L2-VH2-L3-VH1-L4-CH1-L5-Fc; VH1-L1-VH2-L2-VL2-L3-VL1-L4-CH1-L5-Fc; VL1-L1-VL2-L2-VH2-L3-VH1-L4-CL-L5-Fc; VH1-L1-VH2-L2-VL2-L3-VL1-L4-CL-L5-Fc; VL1-L1-VL2-L2-VH2-L3-VH1-L4-CH1-L5-CL-L6-Fc; VH1-L1-VH2-L2-VL2-L3-VL1-L4-CH1-L5-CL-L6-Fc; VL1-L1-VL2-L2-VH2-L3-VH1-L4-CL-L5-CH1-L6-Fc; or VH1-L1-VH2-L2-VL2-L3-VL1-L4-CL-L5-CH1-L6-Fc. In some aspects, the first polypeptide has a structure represented by VL1-VL2-VH2-VH1-CL and the second polypeptide has a structure represented by VL1-VL2-VH2-VH1; VH1-VH2-VL2-VL1; VL1-L1-VL2-L2-VH2-L3-VH1; VH1-L1-VH2-L2-VL2-L3-VL1; VL1-VL2-VH2-VH1-Fc; VH1-VH2-VL2-VL1-Fc; VL1-L1-VL2-L2-VH2-L3-VH1-Fc; VH1-L1-VH2-L2-VL2-L3-VL1-Fc; VL1-L1-VL2-L2-VH2-L3-VH1-L4-Fc; VH1-L1-VH2-L2-VL2-L3-VL1-L4-Fc; VL1-VL2-VH2-VH1-CH1; VH1-VH2-VL2-VL1-CH1; VL1-VL2-VH2-VH1-CL; VH1-VH2-VL2-VL1-CL; VL1-VL2-VH2-VH1-CH1-CL; VH1-VH2-VL2-VL1-CH1-CL; VL1-VL2-VH2-VH1-CL-CH1; VH1-VH2-VL2-VL1-CL-CH1; VL1-L1-VL2-L2-VH2-L3-VH1-L4-CH1; VH1-L1-VH2-L2-VL2-L3-VL1-L4-CH1; VL1-L1-VL2-L2-VH2-L3-VH1-L4-CL; VH1-L1-VH2-L2-VL2-L3-VL1-L4-CL; VL1-L1-VL2-L2-VH2-L3-VH1-L4-CH1-L5-CL; VH1-L1-VH2-L2-VL2-L3-VL1-L4-CH1-L5-CL; VL1-L1-VL2-L2-VH2-L3-VH1-L4-CL-L5-CH1; VH1-L1-VH2-L2-VL2-L3-VL1- L4-CL-L5-CH1; VL1-VL2-VH2-VH1-CH1-Fc; VH1-VH2-VL2-VL1-CH1-Fc; VL1-VL2-VH2-VH1-CL-Fc; VH1-VH2-VL2-VL1-CL-Fc; VL1-VL2-VH2-VH1-CH1-CL-Fc; VH1-VH2-VL2-VL1-CH1-CL-Fc; VL1-VL2-VH2-VH1-CL-CH1-Fc; VH1-VH2-VL2-VL1-CL-CH1-Fc; VL1-L1-VL2-L2-VH2-L3-VH1-L4-CH1-Fc; VH1-L1-VH2-L2-VL2-L3-VL1-L4-CH1-Fc; VL1-L1-VL2-L2-VH2-L3-VH1-L4-CL-Fc; VH1-L1-VH2-L2-VL2-L3-VL1-L4-CL-Fc; VL1-L1-VL2-L2-VH2-L3-VH1-L4-CH1-L5-CL-Fc; VH1-L1-VH2-L2-VL2-L3-VL1-L4-CH1-L5-CL-Fc; VL1-L1-VL2-L2-VH2-L3-VH1-L4-CL-L5-CH1-Fc; VH1-L1-VH2-L2-VL2-L3-VL1-L4-CL-L5-CH1-Fc; VL1-L1-VL2-L2-VH2-L3-VH1-L4-CH1-L5-Fc; VH1-L1-VH2-L2-VL2-L3-VL1-L4-CH1-L5-Fc; VL1-L1-VL2-L2-VH2-L3-VH1-L4-CL-L5-Fc; VH1-L1-VH2-L2-VL2-L3-VL1-L4-CL-L5-Fc; VL1-L1-VL2-L2-VH2-L3-VH1-L4-CH1-L5-CL-L6-Fc; VH1-L1-VH2-L2-VL2-L3-VL1-L4-CH1-L5-CL-L6-Fc; VL1-L1-VL2-L2-VH2-L3-VH1-L4-CL-L5-CH1-L6-Fc; or VH1-L1-VH2-L2-VL2-L3-VL1-L4-CL-L5-CH1-L6-Fc. In some aspects, the first polypeptide has a structure represented by VH1-VH2-VL2-VL1-CL and the second polypeptide has a structure represented by VL1-VL2-VH2-VH1; VH1-VH2-VL2-VL1; VL1-L1-VL2-L2-VH2-L3-VH1; VH1-L1-VH2-L2-VL2-L3-VL1; VL1-VL2-VH2-VH1-Fc; VH1-VH2-VL2-VL1-Fc; VL1-L1-VL2-L2-VH2-L3-VH1-Fc; VH1-L1-VH2-L2-VL2-L3-VL1-Fc; VL1-L1-VL2-L2-VH2-L3-VH1-L4-Fc; VH1-L1-VH2-L2-VL2-L3-VL1-L4-Fc; VL1-VL2-VH2-VH1-CH1; VH1-VH2-VL2-VL1-CH1; VL1-VL2-VH2-VH1-CL; VH1-VH2-VL2-VL1-CL; VL1-VL2-VH2-VH1-CH1-CL; VH1-VH2-VL2-VL1-CH1-CL; VL1-VL2-VH2-VH1-CL-CH1; VH1-VH2-VL2-VL1-CL-CH1; VL1-L1-VL2-L2-VH2-L3-VH1-L4-CH1; VH1-L1-VH2-L2-VL2-L3-VL1-L4-CH1; VL1-L1-VL2-L2-VH2-L3-VH1-L4-CL; VH1-L1-VH2-L2-VL2-L3-VL1-L4-CL; VL1-L1-VL2-L2-VH2-L3- VH1-L4-CH1-L5-CL; VH1-L1-VH2-L2-VL2-L3-VL1-L4-CH1-L5-CL; VL1-L1-VL2-L2-VH2-L3-VH1-L4-CL-L5-CH1; VH1-L1-VH2-L2-VL2-L3-VL1-L4-CL-L5-CH1; VL1-VL2-VH2-VH1-CH1-Fc; VH1-VH2-VL2-VL1-CH1-Fc; VL1-VL2-VH2-VH1-CL-Fc; VH1-VH2-VL2-VL1-CL-Fc; VL1-VL2-VH2-VH1-CH1-CL-Fc; VH1-VH2-VL2-VL1-CH1-CL-Fc; VL1-VL2-VH2-VH1-CL-CH1-Fc; VH1-VH2-VL2-VL1-CL-CH1-Fc; VL1-L1-VL2-L2-VH2-L3-VH1-L4-CH1-Fc; VH1-L1-VH2-L2-VL2-L3-VL1-L4-CH1-Fc; VL1-L1-VL2-L2-VH2-L3-VH1-L4-CL-Fc; VH1-L1-VH2-L2-VL2-L3-VL1-L4-CL-Fc; VL1-L1-VL2-L2-VH2-L3-VH1-L4-CH1-L5-CL-Fc; VH1-L1-VH2-L2-VL2-L3-VL1-L4-CH1-L5-CL-Fc; VL1-L1-VL2-L2-VH2-L3-VH1-L4-CL-L5-CH1-Fc; VH1-L1-VH2-L2-VL2-L3-VL1-L4-CL-L5-CH1-Fc; VL1-L1-VL2-L2-VH2-L3-VH1-L4-CH1-L5-Fc; VH1-L1-VH2-L2-VL2-L3-VL1-L4-CH1-L5-Fc; VL1-L1-VL2-L2- VH2-L3-VH1-L4-CL-L5-Fc; VH1-L1-VH2-L2-VL2-L3-VL1-L4-CL-L5-Fc; VL1-L1-VL2-L2-VH2-L3-VH1-L4-CH1-L5-CL-L6-Fc; VH1-L1-VH2-L2-VL2-L3-VL1-L4-CH1-L5-CL-L6-Fc; VL1-L1-VL2-L2-VH2-L3-VH1-L4-CL-L5-CH1-L6- Fc; or VH1-L1-VH2-L2-VL2-L3-VL1-L4-CL-L5-CH1-L6-Fc. In some aspects, the first polypeptide has a structure represented by VL1-VL2-VH2-VH1-CH1-CL and the second polypeptide has a structure represented by VL1-VL2-VH2-VH1; VH1-VH2-VL2-VL1; VL1-L1-VL2-L2-VH2-L3-VH1; VH1-L1-VH2-L2-VL2-L3-VL1; VL1-VL2-VH2-VH1-Fc; VH1-VH2-VL2-VL1-Fc; VL1-L1-VL2-L2-VH2-L3-VH1-Fc; VH1-L1-VH2-L2-VL2-L3-VL1-Fc; VL1-L1-VL2-L2-VH2-L3-VH1-L4-Fc; VH1-L1-VH2-L2-VL2-L3-VL1-L4-Fc; VL1-VL2-VH2-VH1-CH1; VH1-VH2-VL2-VL1-CH1; VL1-VL2-VH2-VH1-CL; VH1-VH2-VL2-VL1-CL; VL1-VL2-VH2-VH1-CH1-CL; VH1-VH2-VL2-VL1-CH1-CL; VL1-VL2-VH2-VH1-CL-CH1; VH1-VH2-VL2-VL1-CL-CH1; VL1-L1-VL2-L2-VH2-L3-VH1-L4-CH1; VH1-L1-VH2-L2-VL2-L3-VL1-L4-CH1; VL1-L1-VL2-L2-VH2-L3-VH1-L4-CL; VH1-L1-VH2-L2-VL2-L3-VL1-L4-CL; VL1-L1-VL2-L2-VH2-L3-VH1-L4-CH1-L5-CL; VH1-L1-VH2-L2-VL2-L3-VL1-L4-CH1-L5-CL; VL1-L1-VL2-L2-VH2-L3-VH1-L4-CL-L5-CH1; VH1-L1-VH2-L2-VL2-L3-VL1-L4-CL-L5-CH1; VL1-VL2-VH2-VH1-CH1-Fc; VH1-VH2-VL2-VL1-CH1-Fc; VL1-VL2-VH2-VH1-CL-Fc; VH1-VH2-VL2-VL1-CL-Fc; VL1-VL2-VH2-VH1-CH1-CL-Fc; VH1-VH2-VL2-VL1-CH1-CL-Fc; VL1-VL2-VH2-VH1-CL-CH1-Fc; VH1-VH2-VL2-VL1-CL-CH1-Fc; VL1-L1-VL2-L2-VH2-L3-VH1-L4-CH1-Fc; VH1-L1-VH2-L2-VL2-L3-VL1-L4-CH1-Fc; VL1-L1-VL2-L2-VH2-L3- VH1-L4-CL-Fc; VH1-L1-VH2-L2-VL2-L3-VL1-L4-CL-Fc; VL1-L1-VL2-L2-VH2-L3-VH1-L4-CH1-L5-CL-Fc; VH1-L1-VH2-L2-VL2-L3-VL1-L4-CH1-L5-CL-Fc; VL1-L1-VL2-L2-VH2-L3-VH1-L4-CL-L5-CH1-Fc; VH1-L1-VH2-L2-VL2-L3-VL1-L4-CL-L5-CH1-Fc; VL1-L1-VL2-L2-VH2-L3-VH1-L4-CH1-L5-Fc; VH1-L1-VH2-L2-VL2-L3-VL1-L4-CH1-L5-Fc; VL1-L1-VL2-L2-VH2-L3-VH1-L4-CL-L5-Fc; VH1-L1-VH2-L2-VL2-L3-VL1-L4-CL-L5-Fc; VL1-L1-VL2-L2-VH2-L3-VH1-L4-CH1-L5-CL-L6-Fc; VH1-L1-VH2-L2-VL2-L3-VL1-L4-CH1-L5-CL-L6-Fc; VL1-L1-VL2-L2-VH2-L3-VH1-L4-CL-L5-CH1-L6-Fc; or VH1-L1-VH2-L2-VL2-L3-VL1-L4-CL-L5-CH1-L6-Fc. In some aspects, the first polypeptide has a structure represented by VH1-VH2-VL2-VL1-CH1-CL and the second polypeptide has a structure represented by VL1-VL2-VH2-VH1; VH1-VH2-VL2-VL1; VL1-L1-VL2-L2-VH2-L3-VH1; VH1-L1-VH2-L2-VL2-L3-VL1; VL1-VL2-VH2-VH1-Fc; VH1-VH2-VL2-VL1-Fc; VL1-L1-VL2-L2-VH2-L3-VH1-Fc; VH1-L1-VH2-L2-VL2-L3-VL1-Fc; VL1-L1-VL2-L2-VH2-L3-VH1-L4-Fc; VH1-L1-VH2-L2-VL2-L3-VL1-L4-Fc; VL1-VL2-VH2-VH1-CH1; VH1-VH2-VL2-VL1-CH1; VL1-VL2-VH2-VH1-CL; VH1-VH2-VL2-VL1-CL; VL1-VL2-VH2-VH1-CH1-CL; VH1-VH2-VL2-VL1-CH1-CL; VL1-VL2-VH2-VH1-CL-CH1; VH1-VH2-VL2-VL1-CL-CH1; VL1-L1-VL2-L2-VH2-L3-VH1-L4-CH1; VH1-L1-VH2-L2-VL2-L3-VL1-L4-CH1; VL1-L1-VL2-L2-VH2-L3-VH1-L4-CL; VH1-L1-VH2-L2-VL2-L3-VL1-L4-CL; VL1-L1-VL2-L2-VH2-L3-VH1-L4-CH1-L5-CL; VH1-L1-VH2-L2-VL2-L3-VL1- L4-CH1-L5-CL; VL1-L1-VL2-L2-VH2-L3-VH1-L4-CL-L5-CH1; VH1-L1-VH2-L2-VL2-L3-VL1-L4-CL-L5-CH1; VL1-VL2-VH2-VH1-CH1-Fc; VH1-VH2-VL2-VL1-CH1-Fc; VL1-VL2-VH2-VH1-CL-Fc; VH1-VH2-VL2-VL1-CL-Fc; VL1-VL2-VH2-VH1-CH1-CL-Fc; VH1-VH2-VL2-VL1-CH1-CL-Fc; VL1-VL2-VH2-VH1-CL-CH1-Fc; VH1-VH2-VL2-VL1-CL-CH1-Fc; VL1-L1-VL2-L2-VH2-L3-VH1-L4-CH1-Fc; VH1-L1-VH2-L2-VL2-L3-VL1-L4-CH1-Fc; VL1-L1-VL2-L2-VH2-L3-VH1-L4-CL-Fc; VH1-L1-VH2-L2-VL2-L3-VL1-L4-CL-Fc; VL1-L1-VL2-L2-VH2-L3-VH1-L4-CH1-L5-CL-Fc; VH1-L1-VH2-L2-VL2-L3-VL1-L4-CH1-L5-CL-Fc; VL1-L1-VL2-L2-VH2-L3-VH1-L4-CL- L5-CH1-Fc; VH1-L1-VH2-L2-VL2-L3-VL1-L4-CL-L5-CH1-Fc; VL1-L1-VL2-L2-VH2-L3-VH1-L4-CH1-L5-Fc; VH1-L1-VH2-L2-VL2-L3-VL1-L4-CH1-L5-Fc; VL1-L1-VL2-L2-VH2-L3-VH1-L4-CL-L5-Fc; VH1-L1-VH2-L2-VL2-L3-VL1-L4-CL-L5-Fc; VL1-L1-VL2-L2-VH2-L3-VH1-L4-CH1-L5-CL-L6-Fc; VH1-L1-VH2-L2-VL2-L3-VL1-L4-CH1-L5-CL-L6-Fc; VL1-L1-VL2-L2-VH2-L3-VH1-L4-CL-L5-CH1-L6-Fc; or VH1-L1-VH2-L2-VL2-L3-VL1-L4-CL-L5-CH1-L6-Fc. In some aspects, the first polypeptide has a structure represented by VL1-VL2-VH2-VH1-CL-CH1 and the second polypeptide has a structure represented by VL1-VL2-VH2-VH1; VH1-VH2-VL2-VL1; VL1-L1-VL2-L2-VH2-L3-VH1; VH1-L1-VH2-L2-VL2-L3-VL1; VL1-VL2-VH2-VH1-Fc; VH1-VH2-VL2-VL1-Fc; VL1-L1-VL2-L2-VH2-L3-VH1-Fc; VH1-L1-VH2-L2-VL2-L3-VL1-Fc; VL1-L1-VL2-L2-VH2-L3-VH1-L4-Fc; VH1-L1-VH2-L2-VL2-L3-VL1-L4-Fc; VL1-VL2-VH2-VH1-CH1; VH1-VH2-VL2-VL1-CH1; VL1-VL2-VH2-VH1-CL; VH1-VH2-VL2-VL1-CL; VL1-VL2-VH2-VH1-CH1-CL; VH1-VH2-VL2-VL1-CH1-CL; VL1-VL2-VH2-VH1-CL-CH1; VH1-VH2-VL2-VL1-CL-CH1; VL1-L1-VL2-L2-VH2-L3-VH1-L4-CH1; VH1-L1-VH2-L2-VL2-L3-VL1-L4-CH1; VL1- L1-VL2-L2-VH2-L3-VH1-L4-CL; VH1-L1-VH2-L2-VL2-L3-VL1-L4-CL; VL1-L1-VL2-L2-VH2-L3-VH1-L4-CH1- L5-CL; VH1-L1-VH2-L2-VL2-L3-VL1-L4-CH1-L5-CL; VL1-L1-VL2-L2-VH2-L3-VH1-L4-CL-L5-CH1; VH1-L1-VH2-L2-VL2-L3-VL1-L4-CL-L5-CH1; VL1-VL2-VH2-VH1-CH1-Fc; VH1-VH2-VL2-VL1-CH1-Fc; VL1-VL2-VH2-VH1-CL-Fc; VH1-VH2-VL2-VL1-CL-Fc; VL1-VL2-VH2-VH1-CH1-CL-Fc; VH1-VH2-VL2-VL1-CH1-CL-Fc; VL1-VL2-VH2-VH1-CL-CH1-Fc; VH1-VH2-VL2-VL1-CL-CH1-Fc; VL1-L1-VL2-L2-VH2-L3-VH1-L4-CH1-Fc; VH1-L1-VH2-L2-VL2-L3-VL1-L4-CH1-Fc; VL1-L1-VL2-L2-VH2-L3-VH1-L4-CL-Fc; VH1-L1-VH2-L2-VL2-L3-VL1-L4-CL-Fc; VL1-L1-VL2-L2-VH2-L3-VH1-L4-CH1-L5-CL-Fc; VH1-L1-VH2-L2-VL2-L3-VL1-L4-CH1-L5-CL-Fc; VL1-L1-VL2-L2-VH2-L3-VH1-L4-CL-L5-CH1-Fc; VH1-L1-VH2-L2-VL2-L3-VL1-L4-CL-L5-CH1-Fc; VL1-L1-VL2-L2-VH2-L3-VH1-L4-CH1-L5-Fc; VH1-L1-VH2-L2-VL2-L3-VL1-L4-CH1-L5-Fc; VL1-L1-VL2-L2-VH2-L3-VH1- L4-CL-L5-Fc; VH1-L1-VH2-L2-VL2-L3-VL1-L4-CL-L5-Fc; VL1-L1-VL2-L2-VH2-L3-VH1-L4-CH1-L5-CL-L6-Fc; VH1-L1-VH2-L2-VL2-L3-VL1-L4-CH1-L5-CL-L6-Fc; VL1-L1-VL2-L2-VH2-L3-VH1-L4-CL-L5-CH1-L6-Fc; or VH1-L1-VH2-L2-VL2-L3-VL1-L4-CL-L5-CH1-L6-Fc. In some aspects, the first polypeptide has a structure represented by VH1-VH2-VL2-VL1-CL-CH1 and the second polypeptide has a structure represented by VL1-VL2-VH2-VH1; VH1-VH2-VL2-VL1; VL1-L1-VL2-L2-VH2-L3-VH1; VH1-L1-VH2-L2-VL2-L3-VL1; VL1-VL2-VH2-VH1-Fc; VH1-VH2-VL2-VL1-Fc; VL1-L1-VL2-L2-VH2-L3-VH1-Fc; VH1-L1-VH2-L2-VL2-L3-VL1-Fc; VL1-L1-VL2-L2-VH2-L3-VH1-L4-Fc; VH1-L1-VH2-L2-VL2-L3-VL1-L4-Fc; VL1-VL2-VH2-VH1-CH1; VH1-VH2-VL2-VL1-CH1; VL1-VL2-VH2-VH1-CL; VH1-VH2-VL2-VL1-CL; VL1-VL2-VH2-VH1-CH1-CL; VH1-VH2-VL2-VL1-CH1-CL; VL1-VL2-VH2-VH1-CL-CH1; VH1-VH2-VL2-VL1-CL-CH1; VL1-L1-VL2-L2-VH2-L3-VH1-L4-CH1; VH1-L1-VH2-L2-VL2-L3-VL1-L4-CH1; VL1-L1-VL2-L2-VH2-L3-VH1-L4-CL; VH1-L1-VH2-L2-VL2-L3-VL1-L4-CL; VL1-L1-VL2-L2-VH2-L3-VH1-L4-CH1-L5-CL; VH1-L1-VH2-L2-VL2-L3-VL1-L4-CH1-L5-CL; VL1-L1-VL2-L2-VH2-L3-VH1-L4-CL-L5-CH1; VH1-L1-VH2-L2-VL2-L3-VL1-L4-CL-L5-CH1; VL1-VL2-VH2-VH1-CH1-Fc; VH1-VH2-VL2-VL1-CH1-Fc; VL1-VL2-VH2-VH1-CL-Fc; VH1-VH2-VL2-VL1-CL-Fc; VL1-VL2-VH2-VH1-CH1-CL-Fc; VH1-VH2-VL2-VL1-CH1-CL-Fc; VL1-VL2-VH2-VH1-CL-CH1-Fc; VH1-VH2-VL2-VL1-CL-CH1-Fc; VL1-L1-VL2-L2-VH2-L3-VH1-L4-CH1-Fc; VH1-L1-VH2-L2-VL2-L3-VL1-L4-CH1-Fc; VL1-L1-VL2-L2-VH2-L3- VH1-L4-CL-Fc; VH1-L1-VH2-L2-VL2-L3-VL1-L4-CL-Fc; VL1-L1-VL2-L2-VH2-L3-VH1-L4-CH1-L5-CL-Fc; VH1-L1-VH2-L2-VL2-L3-VL1-L4-CH1-L5-CL-Fc; VL1-L1-VL2-L2-VH2-L3-VH1-L4-CL-L5-CH1-Fc; VH1-L1-VH2-L2-VL2-L3-VL1-L4-CL-L5-CH1-Fc; VL1-L1-VL2-L2-VH2-L3-VH1-L4-CH1-L5-Fc; VH1-L1-VH2-L2-VL2-L3-VL1-L4-CH1-L5-Fc; VL1-L1-VL2-L2-VH2-L3-VH1-L4-CL-L5-Fc; VH1-L1-VH2-L2-VL2-L3-VL1-L4-CL-L5-Fc; VL1-L1-VL2-L2-VH2-L3-VH1-L4-CH1-L5-CL-L6-Fc; VH1-L1-VH2-L2-VL2-L3-VL1-L4-CH1-L5-CL-L6-Fc; VL1-L1-VL2-L2-VH2-L3-VH1-L4-CL-L5-CH1-L6-Fc; or VH1-L1-VH2-L2-VL2-L3-VL1-L4-CL-L5-CH1-L6-Fc. In some aspects, the first polypeptide has a structure represented by VL1-L1-VL2-L2-VH2-L3-VH1-L4-CH1 and the second polypeptide has a structure represented by VL1-VL2-VH2-VH1; VH1-VH2-VL2-VL1; VL1-L1-VL2-L2-VH2-L3-VH1; VH1-L1-VH2-L2-VL2-L3-VL1; VL1-VL2-VH2-VH1-Fc; VH1-VH2-VL2-VL1-Fc; VL1-L1-VL2-L2-VH2-L3-VH1-Fc; VH1-L1-VH2-L2-VL2-L3-VL1-Fc; VL1-L1-VL2-L2-VH2-L3-VH1-L4-Fc; VH1-L1-VH2-L2-VL2-L3-VL1-L4-Fc; VL1-VL2-VH2-VH1-CH1; VH1-VH2-VL2-VL1-CH1; VL1-VL2-VH2-VH1-CL; VH1-VH2-VL2-VL1-CL; VL1-VL2-VH2-VH1-CH1-CL; VH1-VH2-VL2-VL1-CH1-CL; VL1-VL2-VH2-VH1-CL-CH1; VH1-VH2-VL2-VL1-CL-CH1; VL1-L1-VL2-L2-VH2-L3-VH1-L4-CH1; VH1-L1-VH2-L2-VL2-L3-VL1-L4-CH1; VL1-L1-VL2-L2-VH2-L3-VH1-L4-CL; VH1-L1-VH2-L2-VL2-L3-VL1-L4-CL; VL1-L1-VL2-L2-VH2-L3-VH1-L4-CH1-L5-CL; VH1-L1-VH2-L2-VL2- L3-VL1-L4-CH1-L5-CL; VL1-L1-VL2-L2-VH2-L3-VH1-L4-CL-L5-CH1; VH1-L1-VH2-L2-VL2-L3-VL1-L4-CL-L5-CH1; VL1-VL2-VH2-VH1-CH1-Fc; VH1-VH2-VL2-VL1-CH1-Fc; VL1-VL2-VH2-VH1-CL-Fc; VH1-VH2-VL2-VL1-CL-Fc; VL1-VL2-VH2-VH1-CH1-CL-Fc; VH1-VH2-VL2-VL1-CH1-CL-Fc; VL1-VL2-VH2-VH1-CL-CH1-Fc; VH1-VH2-VL2-VL1-CL-CH1-Fc; VL1-L1-VL2-L2-VH2-L3-VH1-L4-CH1-Fc; VH1-L1-VH2-L2-VL2-L3-VL1-L4-CH1-Fc; VL1-L1-VL2-L2-VH2-L3-VH1-L4-CL-Fc; VH1-L1-VH2-L2-VL2-L3-VL1-L4-CL-Fc; VL1-L1-VL2-L2-VH2-L3-VH1-L4-CH1-L5-CL-Fc; VH1-L1-VH2-L2-VL2-L3-VL1-L4-CH1-L5-CL-Fc; VL1-L1-VL2-L2-VH2-L3-VH1-L4-CL-L5-CH1-Fc; VH1-L1-VH2-L2-VL2-L3-VL1-L4-CL-L5-CH1-Fc; VL1-L1-VL2-L2-VH2-L3-VH1-L4-CH1-L5-Fc; VH1-L1-VH2-L2-VL2-L3-VL1-L4-CH1-L5-Fc; VL1-L1-VL2-L2-VH2-L3-VH1-L4-CL-L5-Fc; VH1-L1-VH2-L2-VL2-L3-VL1-L4-CL-L5-Fc; VL1-L1-VL2-L2-VH2-L3-VH1-L4-CH1-L5-CL-L6-Fc; VH1-L1-VH2-L2-VL2-L3-VL1-L4-CH1-L5-CL-L6-Fc; VL1-L1-VL2-L2-VH2-L3-VH1-L4-CL-L5-CH1-L6-Fc; or VH1-L1-VH2-L2-VL2-L3-VL1-L4-CL-L5-CH1-L6-Fc. In some aspects, the first polypeptide has a structure represented by VH1-L1-VH2-L2-VL2-L3-VL1-L4-CH1 and the second polypeptide has a structure represented by VL1-VL2-VH2-VH1; VH1-VH2-VL2-VL1; VL1-L1-VL2-L2-VH2-L3-VH1; VH1-L1-VH2-L2-VL2-L3-VL1; VL1-VL2-VH2-VH1-Fc; VH1-VH2-VL2-VL1-Fc; VL1-L1-VL2-L2-VH2-L3-VH1-Fc; VH1-L1-VH2-L2-VL2-L3-VL1-Fc; VL1-L1-VL2-L2-VH2-L3-VH1-L4-Fc; VH1-L1-VH2-L2-VL2-L3-VL1-L4-Fc; VL1-VL2-VH2-VH1-CH1; VH1-VH2-VL2-VL1-CH1; VL1-VL2-VH2-VH1-CL; VH1-VH2-VL2-VL1-CL; VL1-VL2-VH2-VH1-CH1-CL; VH1-VH2-VL2-VL1-CH1-CL; VL1-VL2-VH2-VH1-CL-CH1; VH1-VH2-VL2-VL1-CL-CH1; VL1-L1-VL2-L2-VH2-L3-VH1-L4-CH1; VH1-L1-VH2-L2-VL2-L3-VL1-L4-CH1; VL1-L1-VL2-L2-VH2-L3-VH1-L4-CL; VH1-L1-VH2-L2-VL2-L3-VL1-L4-CL; VL1-L1-VL2-L2-VH2- L3-VH1-L4-CH1-L5-CL; VH1-L1-VH2-L2-VL2-L3-VL1-L4-CH1-L5-CL; VL1-L1-VL2-L2-VH2-L3-VH1-L4-CL-L5-CH1; VH1-L1-VH2-L2-VL2-L3-VL1-L4-CL-L5-CH1; VL1-VL2-VH2-VH1-CH1-Fc; VH1-VH2-VL2-VL1-CH1-Fc; VL1-VL2-VH2-VH1-CL-Fc; VH1-VH2-VL2-VL1-CL-Fc; VL1-VL2-VH2-VH1-CH1-CL-Fc; VH1-VH2-VL2-VL1-CH1-CL-Fc; VL1-VL2-VH2-VH1-CL-CH1-Fc; VH1-VH2-VL2-VL1-CL-CH1-Fc; VL1-L1-VL2-L2-VH2-L3-VH1-L4-CH1-Fc; VH1-L1-VH2-L2-VL2-L3-VL1-L4-CH1-Fc; VL1-L1-VL2-L2-VH2-L3-VH1-L4-CL-Fc; VH1-L1-VH2-L2-VL2-L3-VL1-L4-CL-Fc; VL1-L1-VL2-L2-VH2-L3-VH1-L4-CH1-L5-CL-Fc; VH1-L1-VH2-L2-VL2-L3-VL1-L4-CH1-L5-CL-Fc; VL1-L1-VL2-L2-VH2-L3-VH1-L4-CL-L5-CH1-Fc; VH1-L1-VH2-L2-VL2-L3-VL1-L4-CL-L5-CH1-Fc; VL1-L1-VL2-L2-VH2-L3-VH1-L4-CH1-L5-Fc; VH1-L1-VH2-L2-VL2-L3-VL1-L4-CH1-L5-Fc; VL1-L1-VL2-L2-VH2-L3-VH1-L4-CL-L5-Fc; VH1-L1-VH2-L2-VL2-L3-VL1-L4-CL-L5-Fc; VL1-L1-VL2-L2-VH2-L3-VH1-L4-CH1-L5-CL-L6-Fc; VH1-L1-VH2-L2-VL2-L3-VL1-L4-CH1-L5-CL-L6-Fc; VL1-L1-VL2-L2-VH2-L3-VH1-L4-CL-L5-CH1-L6-Fc; or VH1-L1-VH2-L2-VL2-L3-VL1-L4-CL-L5-CH1-L6-Fc. In some aspects, the first polypeptide has a structure represented by VL1-L1-VL2-L2-VH2-L3-VH1-L4-CL and the second polypeptide has a structure represented by VL1-VL2-VH2-VH1; VH1-VH2-VL2-VL1; VL1-L1-VL2-L2-VH2-L3-VH1; VH1-L1-VH2-L2-VL2-L3-VL1; VL1-VL2-VH2-VH1-Fc; VH1-VH2-VL2-VL1-Fc; VL1-L1-VL2-L2-VH2-L3-VH1-Fc; VH1-L1-VH2-L2-VL2-L3-VL1-Fc; VL1-L1-VL2-L2-VH2-L3-VH1-L4-Fc; VH1-L1-VH2-L2-VL2-L3-VL1-L4-Fc; VL1-VL2-VH2-VH1-CH1; VH1-VH2-VL2-VL1-CH1; VL1-VL2-VH2-VH1-CL; VH1-VH2-VL2-VL1-CL; VL1-VL2-VH2-VH1-CH1-CL; VH1-VH2-VL2-VL1-CH1-CL; VL1-VL2-VH2-VH1-CL-CH1; VH1-VH2-VL2-VL1-CL-CH1; VL1-L1-VL2-L2-VH2-L3-VH1-L4-CH1; VH1-L1-VH2-L2-VL2-L3-VL1-L4-CH1; VL1-L1-VL2-L2-VH2-L3-VH1-L4-CL; VH1-L1-VH2-L2-VL2- L3-VL1-L4-CL; VL1-L1-VL2-L2-VH2-L3-VH1-L4-CH1-L5-CL; VH1-L1-VH2-L2-VL2-L3-VL1-L4-CH1-L5-CL; VL1-L1-VL2-L2-VH2-L3-VH1-L4-CL-L5-CH1; VH1-L1-VH2-L2-VL2-L3-VL1-L4-CL-L5-CH1; VL1-VL2-VH2-VH1-CH1-Fc; VH1-VH2-VL2-VL1-CH1-Fc; VL1-VL2-VH2-VH1-CL-Fc; VH1-VH2-VL2-VL1-CL-Fc; VL1-VL2-VH2-VH1-CH1-CL-Fc; VH1-VH2-VL2-VL1-CH1-CL-Fc; VL1-VL2-VH2-VH1-CL-CH1-Fc; VH1-VH2-VL2-VL1-CL-CH1-Fc; VL1-L1-VL2-L2-VH2-L3-VH1-L4-CH1-Fc; VH1-L1-VH2-L2-VL2-L3-VL1-L4-CH1-Fc; VL1-L1-VL2-L2-VH2-L3-VH1-L4-CL-Fc; VH1-L1-VH2-L2-VL2-L3-VL1-L4-CL-Fc; VL1-L1-VL2-L2-VH2-L3-VH1-L4-CH1-L5-CL- Fc; VH1-L1-VH2-L2-VL2-L3-VL1-L4-CH1-L5-CL-Fc; VL1-L1-VL2-L2-VH2-L3-VH1-L4-CL-L5-CH1-Fc; VH1-L1-VH2-L2-VL2-L3-VL1-L4-CL-L5-CH1-Fc; VL1-L1-VL2-L2-VH2-L3-VH1-L4-CH1-L5-Fc; VH1-L1-VH2-L2-VL2-L3-VL1-L4-CH1-L5-Fc; VL1-L1-VL2-L2-VH2-L3-VH1-L4-CL-L5-Fc; VH1-L1-VH2-L2-VL2-L3-VL1-L4-CL-L5-Fc; VL1-L1-VL2-L2-VH2-L3-VH1-L4-CH1-L5-CL-L6-Fc; VH1-L1-VH2-L2-VL2-L3-VL1-L4-CH1-L5-CL-L6-Fc; VL1-L1-VL2-L2-VH2-L3-VH1-L4-CL-L5-CH1-L6-Fc; or VH1-L1-VH2-L2-VL2-L3-VL1-L4-CL-L5-CH1-L6-Fc. In some aspects, the first polypeptide has a structure represented by VH1-L1-VH2-L2-VL2-L3-VL1-L4-CL and the second polypeptide has a structure represented by VL1-VL2-VH2-VH1; VH1-VH2-VL2-VL1; VL1-L1-VL2-L2-VH2-L3-VH1; VH1-L1-VH2-L2-VL2-L3-VL1; VL1-VL2-VH2-VH1-Fc; VH1-VH2-VL2-VL1-Fc; VL1-L1-VL2-L2-VH2-L3-VH1-Fc; VH1-L1-VH2-L2-VL2-L3-VL1-Fc; VL1-L1-VL2-L2-VH2-L3-VH1-L4-Fc; VH1-L1-VH2-L2-VL2-L3-VL1-L4-Fc; VL1-VL2-VH2-VH1-CH1; VH1-VH2-VL2-VL1-CH1; VL1-VL2-VH2-VH1-CL; VH1-VH2-VL2-VL1-CL; VL1-VL2-VH2-VH1-CH1-CL; VH1-VH2-VL2-VL1-CH1-CL; VL1-VL2-VH2-VH1-CL-CH1; VH1-VH2-VL2-VL1-CL-CH1; VL1-L1-VL2-L2-VH2-L3-VH1-L4-CH1; VH1-L1-VH2-L2-VL2-L3-VL1-L4-CH1; VL1-L1-VL2-L2-VH2-L3-VH1-L4-CL; VH1-L1-VH2-L2-VL2-L3-VL1-L4-CL; VL1-L1-VL2-L2-VH2-L3-VH1-L4-CH1-L5-CL; VH1-L1-VH2-L2-VL2-L3-VL1-L4-CH1-L5-CL; VL1-L1-VL2-L2-VH2-L3-VH1-L4-CL-L5-CH1; VH1-L1-VH2-L2-VL2-L3-VL1- L4-CL-L5-CH1; VL1-VL2-VH2-VH1-CH1-Fc; VH1-VH2-VL2-VL1-CH1-Fc; VL1-VL2-VH2-VH1-CL-Fc; VH1-VH2-VL2-VL1-CL-Fc; VL1-VL2-VH2-VH1-CH1-CL-Fc; VH1-VH2-VL2-VL1-CH1-CL-Fc; VL1-VL2-VH2-VH1-CL-CH1-Fc; VH1-VH2-VL2-VL1-CL-CH1-Fc; VL1-L1-VL2-L2-VH2-L3-VH1-L4-CH1-Fc; VH1-L1-VH2-L2-VL2-L3-VL1-L4-CH1-Fc; VL1-L1-VL2-L2-VH2-L3-VH1-L4-CL-Fc; VH1-L1-VH2-L2-VL2-L3-VL1-L4-CL-Fc; VL1-L1-VL2-L2-VH2-L3-VH1-L4-CH1-L5-CL-Fc; VH1-L1-VH2-L2-VL2-L3-VL1-L4-CH1-L5-CL-Fc; VL1-L1-VL2-L2-VH2-L3-VH1-L4-CL-L5-CH1-Fc; VH1-L1-VH2-L2-VL2-L3-VL1-L4-CL-L5-CH1-Fc; VL1-L1-VL2-L2-VH2-L3-VH1-L4-CH1-L5-Fc; VH1-L1-VH2-L2-VL2-L3-VL1-L4-CH1-L5-Fc; VL1-L1-VL2-L2-VH2-L3-VH1-L4-CL-L5-Fc; VH1-L1-VH2-L2-VL2-L3-VL1-L4-CL-L5-Fc; VL1-L1-VL2-L2-VH2-L3-VH1-L4-CH1-L5-CL-L6-Fc; VH1-L1-VH2-L2-VL2-L3-VL1-L4-CH1-L5-CL-L6-Fc; VL1-L1-VL2-L2-VH2-L3-VH1-L4-CL-L5-CH1-L6-Fc; or VH1-L1-VH2-L2-VL2-L3-VL1-L4-CL-L5-CH1-L6-Fc. In some aspects, the first polypeptide has a structure represented by VL1-L1-VL2-L2-VH2-L3-VH1-L4-CH1-L5-CL and the second polypeptide has a structure represented by VL1-VL2-VH2-VH1; VH1-VH2-VL2-VL1; VL1-L1-VL2-L2-VH2-L3-VH1; VH1-L1-VH2-L2-VL2-L3-VL1; VL1-VL2-VH2-VH1-Fc; VH1-VH2-VL2-VL1-Fc; VL1-L1-VL2-L2-VH2-L3-VH1-Fc; VH1-L1-VH2-L2-VL2-L3-VL1-Fc; VL1-L1-VL2-L2-VH2-L3-VH1-L4-Fc; VH1-L1-VH2-L2-VL2-L3-VL1-L4-Fc; VL1-VL2-VH2-VH1-CH1; VH1-VH2-VL2-VL1-CH1; VL1-VL2-VH2-VH1-CL; VH1-VH2-VL2-VL1-CL; VL1-VL2-VH2-VH1-CH1-CL; VH1-VH2-VL2-VL1-CH1-CL; VL1-VL2-VH2-VH1-CL-CH1; VH1-VH2-VL2-VL1-CL-CH1; VL1-L1-VL2-L2-VH2-L3-VH1-L4-CH1; VH1-L1-VH2-L2-VL2-L3-VL1-L4-CH1; VL1-L1-VL2-L2-VH2-L3-VH1-L4-CL; VH1-L1-VH2-L2-VL2-L3-VL1-L4-CL; VL1-L1-VL2- L2-VH2-L3-VH1-L4-CH1-L5-CL; VH1-L1-VH2-L2-VL2-L3-VL1-L4-CH1-L5-CL; VL1-L1-VL2-L2-VH2-L3-VH1- L4-CL-L5-CH1; VH1-L1-VH2-L2-VL2-L3-VL1-L4-CL-L5-CH1; VL1-VL2-VH2-VH1-CH1-Fc; VH1-VH2-VL2-VL1-CH1-Fc; VL1-VL2-VH2-VH1-CL-Fc; VH1-VH2-VL2-VL1-CL-Fc; VL1-VL2-VH2-VH1-CH1-CL-Fc; VH1-VH2-VL2-VL1-CH1-CL-Fc; VL1-VL2-VH2-VH1-CL-CH1-Fc; VH1-VH2-VL2-VL1-CL-CH1-Fc; VL1-L1-VL2-L2-VH2-L3-VH1-L4-CH1-Fc; VH1-L1-VH2-L2-VL2-L3-VL1-L4-CH1-Fc; VL1-L1-VL2-L2-VH2-L3-VH1-L4-CL-Fc; VH1-L1-VH2-L2-VL2-L3-VL1-L4-CL-Fc; VL1-L1-VL2-L2-VH2-L3-VH1-L4-CH1-L5-CL-Fc; VH1-L1-VH2-L2-VL2-L3-VL1-L4-CH1-L5-CL-Fc; VL1-L1-VL2-L2-VH2-L3-VH1-L4-CL-L5-CH1-Fc; VH1-L1-VH2-L2-VL2-L3-VL1-L4-CL- L5-CH1-Fc; VL1-L1-VL2-L2-VH2-L3-VH1-L4-CH1-L5-Fc; VH1-L1-VH2-L2-VL2-L3-VL1-L4-CH1-L5-Fc; VL1- L1-VL2-L2-VH2-L3-VH1-L4-CL-L5-Fc; VH1-L1-VH2-L2-VL2-L3-VL1-L4-CL-L5-Fc; VL1-L1-VL2-L2-VH2-L3-VH1-L4-CH1-L5-CL-L6-Fc; VH1-L1-VH2-L2-VL2-L3-VL1-L4-CH1-L5-CL-L6-Fc; VL1-L1-VL2-L2-VH2-L3-VH1-L4-CL-L5-CH1-L6-Fc; or VH1-L1-VH2-L2-VL2-L3-VL1-L4-CL-L5-CH1-L6-Fc. In some aspects, the first polypeptide has a structure represented by VH1-L1-VH2-L2-VL2-L3-VL1-L4-CH1-L5-CL and the second polypeptide has a structure represented by VL1-VL2-VH2-VH1; VH1-VH2-VL2-VL1; VL1-L1-VL2-L2-VH2-L3-VH1; VH1-L1-VH2-L2-VL2-L3-VL1; VL1-VL2-VH2-VH1-Fc; VH1-VH2-VL2-VL1-Fc; VL1-L1-VL2-L2-VH2-L3-VH1-Fc; VH1-L1-VH2-L2-VL2-L3-VL1-Fc; VL1-L1-VL2-L2-VH2-L3-VH1-L4-Fc; VH1-L1-VH2-L2-VL2-L3-VL1-L4-Fc; VL1-VL2-VH2-VH1-CH1; VH1-VH2-VL2-VL1-CH1; VL1-VL2-VH2-VH1-CL; VH1-VH2-VL2-VL1-CL; VL1-VL2-VH2-VH1-CH1-CL; VH1-VH2-VL2-VL1-CH1-CL; VL1-VL2-VH2-VH1-CL-CH1; VH1-VH2-VL2-VL1-CL-CH1; VL1-L1-VL2-L2-VH2-L3-VH1-L4-CH1; VH1-L1-VH2-L2-VL2-L3-VL1-L4-CH1; VL1-L1-VL2-L2-VH2-L3-VH1-L4-CL; VH1-L1-VH2-L2-VL2-L3-VL1-L4-CL; VL1-L1-VL2-L2-VH2-L3-VH1-L4-CH1-L5-CL; VH1-L1-VH2-L2-VL2-L3-VL1- L4-CH1-L5-CL; VL1-L1-VL2-L2-VH2-L3-VH1-L4-CL-L5-CH1; VH1-L1-VH2-L2-VL2-L3-VL1-L4-CL-L5-CH1; VL1-VL2-VH2-VH1-CH1-Fc; VH1-VH2-VL2-VL1-CH1-Fc; VL1-VL2-VH2-VH1-CL-Fc; VH1-VH2-VL2-VL1-CL-Fc; VL1-VL2-VH2-VH1-CH1-CL-Fc; VH1-VH2-VL2-VL1-CH1-CL-Fc; VL1-VL2-VH2-VH1-CL-CH1-Fc; VH1-VH2-VL2-VL1-CL-CH1-Fc; VL1-L1-VL2-L2-VH2-L3-VH1-L4-CH1-Fc; VH1-L1-VH2-L2-VL2-L3-VL1-L4-CH1-Fc; VL1-L1-VL2-L2-VH2-L3-VH1-L4-CL-Fc; VH1-L1-VH2-L2-VL2-L3-VL1-L4-CL-Fc; VL1-L1-VL2-L2-VH2-L3-VH1-L4-CH1-L5-CL-Fc; VH1-L1-VH2-L2-VL2-L3-VL1-L4-CH1-L5-CL-Fc; VL1-L1-VL2-L2-VH2-L3-VH1-L4-CL- L5-CH1-Fc; VH1-L1-VH2-L2-VL2-L3-VL1-L4-CL-L5-CH1-Fc; VL1-L1-VL2-L2-VH2-L3-VH1-L4-CH1-L5-Fc; VH1-L1-VH2-L2-VL2-L3-VL1-L4-CH1-L5-Fc; VL1-L1-VL2-L2-VH2-L3-VH1-L4-CL-L5-Fc; VH1-L1-VH2-L2-VL2-L3-VL1-L4-CL-L5-Fc; VL1-L1-VL2-L2-VH2-L3-VH1-L4-CH1-L5-CL-L6-Fc; VH1-L1-VH2-L2-VL2-L3-VL1-L4-CH1-L5-CL-L6-Fc; VL1-L1-VL2-L2-VH2-L3-VH1-L4-CL-L5-CH1-L6-Fc; or VH1-L1-VH2-L2-VL2-L3-VL1-L4-CL-L5-CH1-L6-Fc. In some aspects, the first polypeptide has a structure represented by VL1-L1-VL2-L2-VH2-L3-VH1-L4-CL-L5-CH1 and the second polypeptide has a structure represented by VL1-VL2-VH2-VH1; VH1-VH2-VL2-VL1; VL1-L1-VL2-L2-VH2-L3-VH1; VH1-L1-VH2-L2-VL2-L3-VL1; VL1-VL2-VH2-VH1-Fc; VH1-VH2-VL2-VL1-Fc; VL1-L1-VL2-L2-VH2-L3-VH1-Fc; VH1-L1-VH2-L2-VL2-L3-VL1-Fc; VL1-L1-VL2-L2-VH2-L3-VH1-L4-Fc; VH1-L1-VH2-L2-VL2-L3-VL1-L4-Fc; VL1-VL2-VH2-VH1-CH1; VH1-VH2-VL2-VL1-CH1; VL1-VL2-VH2-VH1-CL; VH1-VH2-VL2-VL1-CL; VL1-VL2-VH2-VH1-CH1-CL; VH1-VH2-VL2-VL1-CH1-CL; VL1-VL2-VH2-VH1-CL-CH1; VH1-VH2-VL2-VL1-CL-CH1; VL1-L1-VL2-L2-VH2-L3-VH1-L4-CH1; VH1-L1-VH2-L2-VL2-L3-VL1-L4-CH1; VL1-L1-VL2-L2-VH2-L3-VH1-L4-CL; VH1-L1-VH2-L2-VL2-L3-VL1-L4-CL; VL1-L1-VL2-L2-VH2- L3-VH1-L4-CH1-L5-CL; VH1-L1-VH2-L2-VL2-L3-VL1-L4-CH1-L5-CL; VL1-L1-VL2-L2-VH2-L3-VH1-L4-CL-L5-CH1; VH1-L1-VH2-L2-VL2-L3-VL1-L4-CL-L5-CH1; VL1-VL2-VH2-VH1-CH1-Fc; VH1-VH2-VL2-VL1-CH1-Fc; VL1-VL2-VH2-VH1-CL-Fc; VH1-VH2-VL2-VL1-CL-Fc; VL1-VL2-VH2-VH1-CH1-CL-Fc; VH1-VH2-VL2-VL1-CH1-CL-Fc; VL1-VL2-VH2-VH1-CL-CH1-Fc; VH1-VH2-VL2-VL1-CL-CH1-Fc; VL1-L1-VL2-L2-VH2-L3-VH1-L4-CH1-Fc; VH1-L1-VH2-L2-VL2-L3-VL1-L4-CH1-Fc; VL1-L1-VL2-L2-VH2-L3-VH1-L4-CL-Fc; VH1-L1-VH2-L2-VL2-L3-VL1-L4-CL-Fc; VL1-L1-VL2-L2-VH2-L3-VH1-L4-CH1-L5-CL-Fc; VH1-L1-VH2-L2-VL2-L3-VL1-L4-CH1-L5-CL-Fc; VL1-L1-VL2-L2-VH2-L3-VH1-L4-CL-L5-CH1-Fc; VH1-L1-VH2-L2-VL2-L3-VL1-L4-CL-L5-CH1-Fc; VL1-L1-VL2-L2-VH2-L3-VH1-L4-CH1-L5-Fc; VH1-L1-VH2-L2-VL2-L3-VL1-L4-CH1-L5-Fc; VL1-L1-VL2-L2-VH2-L3-VH1-L4-CL-L5-Fc; VH1-L1-VH2-L2-VL2-L3-VL1-L4-CL-L5-Fc; VL1-L1-VL2-L2-VH2-L3-VH1-L4-CH1-L5-CL-L6-Fc; VH1-L1-VH2-L2-VL2-L3-VL1-L4-CH1-L5-CL-L6-Fc; VL1-L1-VL2-L2-VH2-L3-VH1-L4-CL-L5-CH1-L6-Fc; or VH1-L1-VH2-L2-VL2-L3-VL1-L4-CL-L5-CH1-L6-Fc. In some aspects, the first polypeptide has a structure represented by VH1-L1-VH2-L2-VL2-L3-VL1-L4-CL-L5-CH1 and the second polypeptide has a structure represented by VL1-VL2-VH2-VH1; VH1-VH2-VL2-VL1; VL1-L1-VL2-L2-VH2-L3-VH1; VH1-L1-VH2-L2-VL2-L3-VL1; VL1-VL2-VH2-VH1-Fc; VH1-VH2-VL2-VL1-Fc; VL1-L1-VL2-L2-VH2-L3-VH1-Fc; VH1-L1-VH2-L2-VL2-L3-VL1-Fc; VL1-L1-VL2-L2-VH2-L3-VH1-L4-Fc; VH1-L1-VH2-L2-VL2-L3-VL1-L4-Fc; VL1-VL2-VH2-VH1-CH1; VH1-VH2-VL2-VL1-CH1; VL1-VL2-VH2-VH1-CL; VH1-VH2-VL2-VL1-CL; VL1-VL2-VH2-VH1-CH1-CL; VH1-VH2-VL2-VL1-CH1-CL; VL1-VL2-VH2-VH1-CL-CH1; VH1-VH2-VL2-VL1-CL-CH1; VL1-L1-VL2-L2-VH2-L3-VH1-L4-CH1; VH1-L1-VH2-L2-VL2-L3-VL1-L4-CH1; VL1-L1-VL2-L2-VH2-L3-VH1-L4-CL; VH1-L1- VH2-L2-VL2-L3-VL1-L4-CL; VL1-L1-VL2-L2-VH2-L3-VH1-L4-CH1-L5-CL; VH1-L1-VH2-L2-VL2-L3-VL1-L4-CH1- L5-CL; VL1-L1-VL2-L2-VH2-L3-VH1-L4-CL-L5-CH1; VH1-L1-VH2-L2-VL2-L3-VL1-L4-CL-L5-CH1; VL1-VL2-VH2-VH1-CH1-Fc; VH1-VH2-VL2-VL1-CH1-Fc; VL1-VL2-VH2-VH1-CL-Fc; VH1-VH2-VL2-VL1-CL-Fc; VL1-VL2-VH2-VH1-CH1-CL-Fc; VH1-VH2-VL2-VL1-CH1-CL-Fc; VL1-VL2-VH2-VH1-CL-CH1-Fc; VH1-VH2-VL2-VL1-CL-CH1-Fc; VL1-L1-VL2-L2-VH2-L3-VH1-L4-CH1-Fc; VH1-L1-VH2-L2-VL2-L3-VL1-L4-CH1-Fc; VL1-L1-VL2-L2-VH2-L3-VH1-L4-CL-Fc; VH1-L1-VH2-L2-VL2-L3-VL1-L4-CL-Fc; VL1-L1-VL2-L2-VH2-L3-VH1-L4-CH1-L5-CL-Fc; VH1-L1-VH2-L2-VL2-L3-VL1-L4-CH1-L5-CL-Fc; VL1-L1-VL2-L2-VH2-L3-VH1-L4-CL-L5-CH1-Fc; VH1-L1-VH2-L2-VL2-L3-VL1-L4-CL-L5-CH1-Fc; VL1-L1-VL2-L2-VH2-L3-VH1-L4-CH1-L5-Fc; VH1-L1-VH2-L2-VL2-L3-VL1-L4-CH1-L5-Fc; VL1-L1-VL2-L2-VH2-L3-VH1-L4-CL-L5-Fc; VH1-L1-VH2-L2-VL2-L3-VL1-L4-CL-L5-Fc; VL1-L1-VL2-L2-VH2-L3-VH1-L4-CH1-L5-CL-L6-Fc; VH1-L1-VH2-L2-VL2-L3-VL1-L4-CH1-L5-CL-L6-Fc; VL1-L1-VL2-L2-VH2-L3-VH1-L4-CL-L5-CH1-L6-Fc; or VH1-L1-VH2-L2-VL2-L3-VL1-L4-CL-L5-CH1-L6-Fc. In some aspects, the first polypeptide has a structure represented by VL1-VL2-VH2-VH1-CH1-Fc and the second polypeptide has a structure represented by VL1-VL2-VH2-VH1; VH1-VH2-VL2-VL1; VL1-L1-VL2-L2-VH2-L3-VH1; VH1-L1-VH2-L2-VL2-L3-VL1; VL1-VL2-VH2-VH1-Fc; VH1-VH2-VL2-VL1-Fc; VL1-L1-VL2-L2-VH2-L3-VH1-Fc; VH1-L1-VH2-L2-VL2-L3-VL1-Fc; VL1-L1-VL2-L2-VH2-L3-VH1-L4-Fc; VH1-L1-VH2-L2-VL2-L3-VL1-L4-Fc; VL1-VL2-VH2-VH1-CH1; VH1-VH2-VL2-VL1-CH1; VL1-VL2-VH2-VH1-CL; VH1-VH2-VL2-VL1-CL; VL1-VL2-VH2-VH1-CH1-CL; VH1-VH2-VL2-VL1-CH1-CL; VL1-VL2-VH2-VH1-CL-CH1; VH1-VH2-VL2-VL1-CL-CH1; VL1-L1-VL2-L2-VH2-L3-VH1-L4-CH1; VH1-L1-VH2-L2-VL2-L3-VL1-L4-CH1; VL1-L1-VL2-L2-VH2-L3-VH1-L4-CL; VH1-L1-VH2-L2-VL2-L3-VL1-L4-CL; VL1-L1-VL2-L2-VH2-L3-VH1-L4-CH1-L5-CL; VH1-L1-VH2-L2-VL2-L3-VL1-L4-CH1-L5-CL; VL1-L1-VL2-L2-VH2-L3-VH1-L4-CL-L5-CH1; VH1-L1-VH2-L2-VL2-L3-VL1- L4-CL-L5-CH1; VL1-VL2-VH2-VH1-CH1-Fc; VH1-VH2-VL2-VL1-CH1-Fc; VL1-VL2-VH2-VH1-CL-Fc; VH1-VH2-VL2-VL1-CL-Fc; VL1-VL2-VH2-VH1-CH1-CL-Fc; VH1-VH2-VL2-VL1-CH1-CL-Fc; VL1-VL2-VH2-VH1-CL-CH1-Fc; VH1-VH2-VL2-VL1-CL-CH1-Fc; VL1-L1-VL2-L2-VH2-L3-VH1-L4-CH1-Fc; VH1-L1-VH2-L2-VL2-L3-VL1-L4-CH1-Fc; VL1-L1-VL2-L2-VH2-L3-VH1-L4-CL-Fc; VH1-L1-VH2-L2-VL2-L3-VL1-L4-CL-Fc; VL1-L1-VL2-L2-VH2-L3-VH1-L4-CH1-L5-CL-Fc; VH1-L1-VH2-L2-VL2-L3-VL1-L4-CH1-L5-CL-Fc; VL1-L1-VL2-L2-VH2-L3-VH1-L4-CL-L5-CH1-Fc; VH1-L1-VH2-L2-VL2-L3-VL1-L4-CL-L5-CH1-Fc; VL1-L1-VL2-L2-VH2-L3-VH1-L4-CH1-L5-Fc; VH1-L1-VH2-L2-VL2-L3-VL1-L4-CH1-L5-Fc; VL1-L1-VL2-L2-VH2-L3-VH1-L4-CL-L5-Fc; VH1-L1-VH2-L2-VL2-L3-VL1-L4-CL-L5-Fc; VL1-L1-VL2-L2-VH2-L3-VH1-L4-CH1-L5-CL-L6-Fc; VH1-L1-VH2-L2-VL2-L3-VL1-L4-CH1-L5-CL-L6-Fc; VL1-L1-VL2-L2-VH2-L3-VH1-L4-CL-L5-CH1-L6-Fc; or VH1-L1-VH2-L2-VL2-L3-VL1-L4-CL-L5-CH1-L6-Fc. In some aspects, the first polypeptide has a structure represented by VH1-VH2-VL2-VL1-CH1-Fc and the second polypeptide has a structure represented by VL1-VL2-VH2-VH1; VH1-VH2-VL2-VL1; VL1-L1-VL2-L2-VH2-L3-VH1; VH1-L1-VH2-L2-VL2-L3-VL1; VL1-VL2-VH2-VH1-Fc; VH1-VH2-VL2-VL1-Fc; VL1-L1-VL2-L2-VH2-L3-VH1-Fc; VH1-L1-VH2-L2-VL2-L3-VL1-Fc; VL1-L1-VL2-L2-VH2-L3-VH1-L4-Fc; VH1-L1-VH2-L2-VL2-L3-VL1-L4-Fc; VL1-VL2-VH2-VH1-CH1; VH1-VH2-VL2-VL1-CH1; VL1-VL2-VH2-VH1-CL; VH1-VH2-VL2-VL1-CL; VL1-VL2-VH2-VH1-CH1-CL; VH1-VH2-VL2-VL1-CH1-CL; VL1-VL2-VH2-VH1-CL-CH1; VH1-VH2-VL2-VL1-CL-CH1; VL1-L1-VL2-L2-VH2-L3-VH1-L4-CH1; VH1-L1-VH2-L2-VL2-L3-VL1-L4-CH1; VL1-L1-VL2-L2-VH2-L3-VH1-L4-CL; VH1-L1-VH2-L2-VL2-L3-VL1-L4-CL; VL1-L1-VL2-L2-VH2- L3-VH1-L4-CH1-L5-CL; VH1-L1-VH2-L2-VL2-L3-VL1-L4-CH1-L5-CL; VL1-L1-VL2-L2-VH2-L3-VH1-L4-CL-L5-CH1; VH1-L1-VH2-L2-VL2-L3-VL1-L4-CL-L5-CH1; VL1-VL2-VH2-VH1-CH1-Fc; VH1-VH2-VL2-VL1-CH1-Fc; VL1-VL2-VH2-VH1-CL-Fc; VH1-VH2-VL2-VL1-CL-Fc; VL1-VL2-VH2-VH1-CH1-CL-Fc; VH1-VH2-VL2-VL1-CH1-CL-Fc; VL1-VL2-VH2-VH1-CL-CH1-Fc; VH1-VH2-VL2-VL1-CL-CH1-Fc; VL1-L1-VL2-L2-VH2-L3-VH1-L4-CH1-Fc; VH1-L1-VH2-L2-VL2-L3-VL1-L4-CH1-Fc; VL1-L1-VL2-L2-VH2-L3-VH1-L4-CL-Fc; VH1-L1-VH2-L2-VL2-L3-VL1-L4-CL-Fc; VL1-L1-VL2-L2-VH2-L3-VH1-L4-CH1-L5-CL-Fc; VH1-L1-VH2-L2-VL2-L3-VL1-L4-CH1-L5-CL-Fc; VL1-L1-VL2-L2-VH2-L3-VH1-L4-CL-L5-CH1-Fc; VH1-L1-VH2-L2-VL2-L3-VL1-L4-CL-L5-CH1-Fc; VL1-L1-VL2-L2-VH2-L3-VH1-L4-CH1-L5-Fc; VH1-L1-VH2-L2-VL2-L3-VL1-L4-CH1-L5-Fc; VL1-L1-VL2-L2-VH2-L3-VH1-L4-CL-L5-Fc; VH1-L1-VH2-L2-VL2-L3-VL1-L4-CL-L5-Fc; VL1-L1-VL2-L2-VH2-L3-VH1-L4-CH1-L5-CL-L6-Fc; VH1-L1-VH2-L2-VL2-L3-VL1-L4-CH1-L5-CL-L6-Fc; VL1-L1-VL2-L2-VH2-L3-VH1-L4-CL-L5-CH1-L6-Fc; or VH1-L1-VH2-L2-VL2-L3-VL1-L4-CL-L5-CH1-L6-Fc. In some aspects, the first polypeptide has a structure represented by VL1-VL2-VH2-VH1-CL-Fc and the second polypeptide has a structure represented by VL1-VL2-VH2-VH1; VH1-VH2-VL2-VL1; VL1-L1-VL2-L2-VH2-L3-VH1; VH1-L1-VH2-L2-VL2-L3-VL1; VL1-VL2-VH2-VH1-Fc; VH1-VH2-VL2-VL1-Fc; VL1-L1-VL2-L2-VH2-L3-VH1-Fc; VH1-L1-VH2-L2-VL2-L3-VL1-Fc; VL1-L1-VL2-L2-VH2-L3-VH1-L4-Fc; VH1-L1-VH2-L2-VL2-L3-VL1-L4-Fc; VL1-VL2-VH2-VH1-CH1; VH1-VH2-VL2-VL1-CH1; VL1-VL2-VH2-VH1-CL; VH1-VH2-VL2-VL1-CL; VL1-VL2-VH2-VH1-CH1-CL; VH1-VH2-VL2-VL1-CH1-CL; VL1-VL2-VH2-VH1-CL-CH1; VH1-VH2-VL2-VL1-CL-CH1; VL1-L1-VL2-L2-VH2-L3-VH1-L4-CH1; VH1-L1-VH2-L2-VL2-L3-VL1-L4-CH1; VL1-L1-VL2-L2-VH2-L3-VH1-L4-CL; VH1-L1-VH2-L2-VL2-L3-VL1-L4-CL; VL1-L1-VL2-L2-VH2-L3-VH1-L4-CH1-L5-CL; VH1-L1-VH2-L2-VL2-L3-VL1-L4-CH1-L5-CL; VL1-L1-VL2-L2-VH2-L3-VH1-L4-CL-L5-CH1; VH1-L1-VH2-L2-VL2-L3-VL1-L4-CL-L5-CH1; VL1-VL2-VH2-VH1-CH1-Fc; VH1-VH2-VL2-VL1-CH1-Fc; VL1-VL2-VH2-VH1-CL-Fc; VH1-VH2-VL2-VL1-CL-Fc; VL1-VL2-VH2-VH1-CH1-CL-Fc; VH1-VH2-VL2-VL1-CH1-CL-Fc; VL1-VL2-VH2-VH1-CL-CH1-Fc; VH1-VH2-VL2-VL1-CL-CH1-Fc; VL1-L1-VL2-L2-VH2-L3-VH1-L4-CH1-Fc; VH1-L1-VH2-L2-VL2-L3-VL1-L4-CH1-Fc; VL1-L1-VL2-L2-VH2-L3- VH1-L4-CL-Fc; VH1-L1-VH2-L2-VL2-L3-VL1-L4-CL-Fc; VL1-L1-VL2-L2-VH2-L3-VH1-L4-CH1-L5-CL-Fc; VH1-L1-VH2-L2-VL2-L3-VL1-L4-CH1-L5-CL-Fc; VL1-L1-VL2-L2-VH2-L3-VH1-L4-CL-L5-CH1-Fc; VH1-L1-VH2-L2-VL2-L3-VL1-L4-CL-L5-CH1-Fc; VL1-L1-VL2-L2-VH2-L3-VH1-L4-CH1-L5-Fc; VH1-L1-VH2-L2-VL2-L3-VL1-L4-CH1-L5-Fc; VL1-L1-VL2-L2-VH2-L3-VH1-L4-CL-L5-Fc; VH1-L1-VH2-L2-VL2-L3-VL1-L4-CL-L5-Fc; VL1-L1-VL2-L2-VH2-L3-VH1-L4-CH1-L5-CL-L6-Fc; VH1-L1-VH2-L2-VL2-L3-VL1-L4-CH1-L5-CL-L6-Fc; VL1-L1-VL2-L2-VH2-L3-VH1-L4-CL-L5-CH1-L6-Fc; or VH1-L1-VH2-L2-VL2-L3-VL1-L4-CL-L5-CH1-L6-Fc. In some aspects, the first polypeptide has a structure represented by VH1-VH2-VL2-VL1-CL-Fc and the second polypeptide has a structure represented by VL1-VL2-VH2-VH1; VH1-VH2-VL2-VL1; VL1-L1-VL2-L2-VH2-L3-VH1; VH1-L1-VH2-L2-VL2-L3-VL1; VL1-VL2-VH2-VH1-Fc; VH1-VH2-VL2-VL1-Fc; VL1-L1-VL2-L2-VH2-L3-VH1-Fc; VH1-L1-VH2-L2-VL2-L3-VL1-Fc; VL1-L1-VL2-L2-VH2-L3-VH1-L4-Fc; VH1-L1-VH2-L2-VL2-L3-VL1-L4-Fc; VL1-VL2-VH2-VH1-CH1; VH1-VH2-VL2-VL1-CH1; VL1-VL2-VH2-VH1-CL; VH1-VH2-VL2-VL1-CL; VL1-VL2-VH2-VH1-CH1-CL; VH1-VH2-VL2-VL1-CH1-CL; VL1-VL2-VH2-VH1-CL-CH1; VH1-VH2-VL2-VL1-CL-CH1; VL1-L1-VL2-L2-VH2-L3-VH1-L4-CH1; VH1-L1-VH2-L2-VL2-L3-VL1-L4-CH1; VL1-L1-VL2-L2-VH2-L3-VH1-L4-CL; VH1-L1-VH2-L2-VL2-L3-VL1-L4-CL; VL1-L1-VL2-L2-VH2-L3-VH1-L4-CH1-L5-CL; VH1-L1-VH2-L2-VL2-L3-VL1- L4-CH1-L5-CL; VL1-L1-VL2-L2-VH2-L3-VH1-L4-CL-L5-CH1; VH1-L1-VH2-L2-VL2-L3-VL1-L4-CL-L5-CH1; VL1-VL2-VH2-VH1-CH1-Fc; VH1-VH2-VL2-VL1-CH1-Fc; VL1-VL2-VH2-VH1-CL-Fc; VH1-VH2-VL2-VL1-CL-Fc; VL1-VL2-VH2-VH1-CH1-CL-Fc; VH1-VH2-VL2-VL1-CH1-CL-Fc; VL1-VL2-VH2-VH1-CL-CH1-Fc; VH1-VH2-VL2-VL1-CL-CH1-Fc; VL1-L1-VL2-L2-VH2-L3-VH1-L4-CH1-Fc; VH1-L1-VH2-L2-VL2-L3-VL1-L4-CH1-Fc; VL1-L1-VL2-L2-VH2-L3-VH1-L4-CL-Fc; VH1-L1-VH2-L2-VL2-L3-VL1-L4-CL-Fc; VL1-L1-VL2-L2-VH2-L3-VH1-L4-CH1-L5-CL-Fc; VH1-L1-VH2-L2-VL2-L3-VL1-L4-CH1-L5-CL-Fc; VL1-L1-VL2-L2-VH2-L3-VH1-L4-CL- L5-CH1-Fc; VH1-L1-VH2-L2-VL2-L3-VL1-L4-CL-L5-CH1-Fc; VL1-L1-VL2-L2-VH2-L3-VH1-L4-CH1-L5-Fc; VH1-L1-VH2-L2-VL2-L3-VL1-L4-CH1-L5-Fc; VL1-L1-VL2-L2-VH2-L3-VH1-L4-CL-L5-Fc; VH1-L1-VH2-L2-VL2-L3-VL1-L4-CL-L5-Fc; VL1-L1-VL2-L2-VH2-L3-VH1-L4-CH1-L5-CL-L6-Fc; VH1-L1-VH2-L2-VL2-L3-VL1-L4-CH1-L5-CL-L6-Fc; VL1-L1-VL2-L2-VH2-L3-VH1-L4-CL-L5-CH1-L6-Fc; or VH1-L1-VH2-L2-VL2-L3-VL1-L4-CL-L5-CH1-L6-Fc. In some aspects, the first polypeptide has a structure represented by VL1-VL2-VH2-VH1-CH1-CL-Fc and the second polypeptide has a structure represented by VL1-VL2-VH2-VH1; VH1-VH2-VL2-VL1; VL1-L1-VL2-L2-VH2-L3-VH1; VH1-L1-VH2-L2-VL2-L3-VL1; VL1-VL2-VH2-VH1-Fc; VH1-VH2-VL2-VL1-Fc; VL1-L1-VL2-L2-VH2-L3-VH1-Fc; VH1-L1-VH2-L2-VL2-L3-VL1-Fc; VL1-L1-VL2-L2-VH2-L3-VH1-L4-Fc; VH1-L1-VH2-L2-VL2-L3-VL1-L4-Fc; VL1-VL2-VH2-VH1-CH1; VH1-VH2-VL2-VL1-CH1; VL1-VL2-VH2-VH1-CL; VH1-VH2-VL2-VL1-CL; VL1-VL2-VH2-VH1-CH1-CL; VH1-VH2-VL2-VL1-CH1-CL; VL1-VL2-VH2-VH1-CL-CH1; VH1-VH2-VL2-VL1-CL-CH1; VL1-L1-VL2-L2-VH2-L3-VH1-L4-CH1; VH1-L1-VH2-L2-VL2-L3-VL1-L4-CH1; VL1- L1-VL2-L2-VH2-L3-VH1-L4-CL; VH1-L1-VH2-L2-VL2-L3-VL1-L4-CL; VL1-L1-VL2-L2-VH2-L3-VH1-L4-CH1- L5-CL; VH1-L1-VH2-L2-VL2-L3-VL1-L4-CH1-L5-CL; VL1-L1-VL2-L2-VH2-L3-VH1-L4-CL-L5-CH1; VH1-L1-VH2-L2-VL2-L3-VL1-L4-CL-L5-CH1; VL1-VL2-VH2-VH1-CH1-Fc; VH1-VH2-VL2-VL1-CH1-Fc; VL1-VL2-VH2-VH1-CL-Fc; VH1-VH2-VL2-VL1-CL-Fc; VL1-VL2-VH2-VH1-CH1-CL-Fc; VH1-VH2-VL2-VL1-CH1-CL-Fc; VL1-VL2-VH2-VH1-CL-CH1-Fc; VH1-VH2-VL2-VL1-CL-CH1-Fc; VL1-L1-VL2-L2-VH2-L3-VH1-L4-CH1-Fc; VH1-L1-VH2-L2-VL2-L3-VL1-L4-CH1-Fc; VL1-L1-VL2-L2-VH2-L3-VH1-L4-CL-Fc; VH1-L1-VH2-L2-VL2-L3-VL1-L4-CL-Fc; VL1-L1-VL2-L2-VH2-L3-VH1-L4-CH1-L5-CL-Fc; VH1-L1-VH2-L2-VL2-L3-VL1-L4-CH1-L5-CL-Fc; VL1-L1-VL2-L2-VH2-L3-VH1-L4-CL-L5-CH1-Fc; VH1-L1-VH2-L2-VL2-L3-VL1-L4-CL-L5-CH1-Fc; VL1-L1-VL2-L2-VH2-L3-VH1-L4-CH1-L5-Fc; VH1-L1-VH2-L2-VL2-L3-VL1-L4-CH1-L5-Fc; VL1-L1-VL2-L2-VH2-L3-VH1- L4-CL-L5-Fc; VH1-L1-VH2-L2-VL2-L3-VL1-L4-CL-L5-Fc; VL1-L1-VL2-L2-VH2-L3-VH1-L4-CH1-L5-CL-L6-Fc; VH1-L1-VH2-L2-VL2-L3-VL1-L4-CH1-L5-CL-L6-Fc; VL1-L1-VL2-L2-VH2-L3-VH1-L4-CL-L5-CH1-L6-Fc; or VH1-L1-VH2-L2-VL2-L3-VL1-L4-CL-L5-CH1-L6-Fc. In some aspects, the first polypeptide has a structure represented by VH1-VH2-VL2-VL1-CH1-CL-Fc and the second polypeptide has a structure represented by VL1-VL2-VH2-VH1; VH1-VH2-VL2-VL1; VL1-L1-VL2-L2-VH2-L3-VH1; VH1-L1-VH2-L2-VL2-L3-VL1; VL1-VL2-VH2-VH1-Fc; VH1-VH2-VL2-VL1-Fc; VL1-L1-VL2-L2-VH2-L3-VH1-Fc; VH1-L1-VH2-L2-VL2-L3-VL1-Fc; VL1-L1-VL2-L2-VH2-L3-VH1-L4-Fc; VH1-L1-VH2-L2-VL2-L3-VL1-L4-Fc; VL1-VL2-VH2-VH1-CH1; VH1-VH2-VL2-VL1-CH1; VL1-VL2-VH2-VH1-CL; VH1-VH2-VL2-VL1-CL; VL1-VL2-VH2-VH1-CH1-CL; VH1-VH2-VL2-VL1-CH1-CL; VL1-VL2-VH2-VH1-CL-CH1; VH1-VH2-VL2-VL1-CL-CH1; VL1-L1-VL2-L2-VH2-L3-VH1-L4-CH1; VH1-L1-VH2-L2-VL2-L3-VL1-L4-CH1; VL1-L1-VL2-L2-VH2-L3-VH1-L4-CL; VH1-L1-VH2-L2-VL2-L3-VL1-L4-CL; VL1-L1-VL2-L2-VH2-L3-VH1-L4-CH1-L5-CL; VH1-L1-VH2-L2-VL2-L3-VL1-L4-CH1-L5-CL; VL1-L1-VL2-L2-VH2-L3-VH1-L4-CL-L5-CH1; VH1-L1-VH2-L2-VL2-L3-VL1-L4-CL-L5-CH1; VL1-VL2-VH2-VH1-CH1-Fc; VH1-VH2-VL2-VL1-CH1-Fc; VL1-VL2-VH2-VH1-CL-Fc; VH1-VH2-VL2-VL1-CL-Fc; VL1-VL2-VH2-VH1-CH1-CL-Fc; VH1-VH2-VL2-VL1-CH1-CL-Fc; VL1-VL2-VH2-VH1-CL-CH1-Fc; VH1-VH2-VL2-VL1-CL-CH1-Fc; VL1-L1-VL2-L2-VH2-L3-VH1-L4-CH1-Fc; VH1-L1-VH2-L2-VL2-L3-VL1-L4-CH1-Fc; VL1-L1-VL2-L2-VH2-L3- VH1-L4-CL-Fc; VH1-L1-VH2-L2-VL2-L3-VL1-L4-CL-Fc; VL1-L1-VL2-L2-VH2-L3-VH1-L4-CH1-L5-CL-Fc; VH1-L1-VH2-L2-VL2-L3-VL1-L4-CH1-L5-CL-Fc; VL1-L1-VL2-L2-VH2-L3-VH1-L4-CL-L5-CH1-Fc; VH1-L1-VH2-L2-VL2-L3-VL1-L4-CL-L5-CH1-Fc; VL1-L1-VL2-L2-VH2-L3-VH1-L4-CH1-L5-Fc; VH1-L1-VH2-L2-VL2-L3-VL1-L4-CH1-L5-Fc; VL1-L1-VL2-L2-VH2-L3-VH1-L4-CL-L5-Fc; VH1-L1-VH2-L2-VL2-L3-VL1-L4-CL-L5-Fc; VL1-L1-VL2-L2-VH2-L3-VH1-L4-CH1-L5-CL-L6-Fc; VH1-L1-VH2-L2-VL2-L3-VL1-L4-CH1-L5-CL-L6-Fc; VL1-L1-VL2-L2-VH2-L3-VH1-L4-CL-L5-CH1-L6-Fc; or VH1-L1-VH2-L2-VL2-L3-VL1-L4-CL-L5-CH1-L6-Fc. In some aspects, the first polypeptide has a structure represented by VL1-VL2-VH2-VH1-CL-CH1-Fc and the second polypeptide has a structure represented by VL1-VL2-VH2-VH1; VH1-VH2-VL2-VL1; VL1-L1-VL2-L2-VH2-L3-VH1; VH1-L1-VH2-L2-VL2-L3-VL1; VL1-VL2-VH2-VH1-Fc; VH1-VH2-VL2-VL1-Fc; VL1-L1-VL2-L2-VH2-L3-VH1-Fc; VH1-L1-VH2-L2-VL2-L3-VL1-Fc; VL1-L1-VL2-L2-VH2-L3-VH1-L4-Fc; VH1-L1-VH2-L2-VL2-L3-VL1-L4-Fc; VL1-VL2-VH2-VH1-CH1; VH1-VH2-VL2-VL1-CH1; VL1-VL2-VH2-VH1-CL; VH1-VH2-VL2-VL1-CL; VL1-VL2-VH2-VH1-CH1-CL; VH1-VH2-VL2-VL1-CH1-CL; VL1-VL2-VH2-VH1-CL-CH1; VH1-VH2-VL2-VL1-CL-CH1; VL1-L1-VL2-L2-VH2-L3-VH1-L4-CH1; VH1-L1-VH2-L2-VL2-L3-VL1-L4-CH1; VL1-L1-VL2-L2-VH2-L3-VH1-L4-CL; VH1-L1-VH2-L2-VL2-L3-VL1-L4-CL; VL1-L1-VL2-L2-VH2-L3-VH1-L4-CH1-L5-CL; VH1-L1-VH2-L2-VL2-L3-VL1- L4-CH1-L5-CL; VL1-L1-VL2-L2-VH2-L3-VH1-L4-CL-L5-CH1; VH1-L1-VH2-L2-VL2-L3-VL1-L4-CL-L5-CH1; VL1-VL2-VH2-VH1-CH1-Fc; VH1-VH2-VL2-VL1-CH1-Fc; VL1-VL2-VH2-VH1-CL-Fc; VH1-VH2-VL2-VL1-CL-Fc; VL1-VL2-VH2-VH1-CH1-CL-Fc; VH1-VH2-VL2-VL1-CH1-CL-Fc; VL1-VL2-VH2-VH1-CL-CH1-Fc; VH1-VH2-VL2-VL1-CL-CH1-Fc; VL1-L1-VL2-L2-VH2-L3-VH1-L4-CH1-Fc; VH1-L1-VH2-L2-VL2-L3-VL1-L4-CH1-Fc; VL1-L1-VL2-L2-VH2-L3-VH1-L4-CL-Fc; VH1-L1-VH2-L2-VL2-L3-VL1-L4-CL-Fc; VL1-L1-VL2-L2-VH2-L3-VH1-L4-CH1-L5-CL-Fc; VH1-L1-VH2-L2-VL2-L3-VL1-L4-CH1-L5-CL-Fc; VL1-L1-VL2-L2-VH2-L3-VH1-L4-CL- L5-CH1-Fc; VH1-L1-VH2-L2-VL2-L3-VL1-L4-CL-L5-CH1-Fc; VL1-L1-VL2-L2-VH2-L3-VH1-L4-CH1-L5-Fc; VH1-L1-VH2-L2-VL2-L3-VL1-L4-CH1-L5-Fc; VL1-L1-VL2-L2-VH2-L3-VH1-L4-CL-L5-Fc; VH1-L1-VH2-L2-VL2-L3-VL1-L4-CL-L5-Fc; VL1-L1-VL2-L2-VH2-L3-VH1-L4-CH1-L5-CL-L6-Fc; VH1-L1-VH2-L2-VL2-L3-VL1-L4-CH1-L5-CL-L6-Fc; VL1-L1-VL2-L2-VH2-L3-VH1-L4-CL-L5-CH1-L6-Fc; or VH1-L1-VH2-L2-VL2-L3-VL1-L4-CL-L5-CH1-L6-Fc. In some aspects, the first polypeptide has a structure represented by VH1-VH2-VL2-VL1-CL-CH1-Fc and the second polypeptide has a structure represented by VL1-VL2-VH2-VH1; VH1-VH2-VL2-VL1; VL1-L1-VL2-L2-VH2-L3-VH1; VH1-L1-VH2-L2-VL2-L3-VL1; VL1-VL2-VH2-VH1-Fc; VH1-VH2-VL2-VL1-Fc; VL1-L1-VL2-L2-VH2-L3-VH1-Fc; VH1-L1-VH2-L2-VL2-L3-VL1-Fc; VL1-L1-VL2-L2-VH2-L3-VH1-L4-Fc; VH1-L1-VH2-L2-VL2-L3-VL1-L4-Fc; VL1-VL2-VH2-VH1-CH1; VH1-VH2-VL2-VL1-CH1; VL1-VL2-VH2-VH1-CL; VH1-VH2-VL2-VL1-CL; VL1-VL2-VH2-VH1-CH1-CL; VH1-VH2-VL2-VL1-CH1-CL; VL1-VL2-VH2-VH1-CL-CH1; VH1-VH2-VL2-VL1-CL-CH1; VL1-L1-VL2-L2-VH2-L3-VH1-L4-CH1; VH1-L1-VH2-L2-VL2-L3-VL1-L4-CH1; VL1- L1-VL2-L2-VH2-L3-VH1-L4-CL; VH1-L1-VH2-L2-VL2-L3-VL1-L4-CL; VL1-L1-VL2-L2-VH2-L3-VH1-L4-CH1- L5-CL; VH1-L1-VH2-L2-VL2-L3-VL1-L4-CH1-L5-CL; VL1-L1-VL2-L2-VH2-L3-VH1-L4-CL-L5-CH1; VH1-L1-VH2-L2-VL2-L3-VL1-L4-CL-L5-CH1; VL1-VL2-VH2-VH1-CH1-Fc; VH1-VH2-VL2-VL1-CH1-Fc; VL1-VL2-VH2-VH1-CL-Fc; VH1-VH2-VL2-VL1-CL-Fc; VL1-VL2-VH2-VH1-CH1-CL-Fc; VH1-VH2-VL2-VL1-CH1-CL-Fc; VL1-VL2-VH2-VH1-CL-CH1-Fc; VH1-VH2-VL2-VL1-CL-CH1-Fc; VL1-L1-VL2-L2-VH2-L3-VH1-L4-CH1-Fc; VH1-L1-VH2-L2-VL2-L3-VL1-L4-CH1-Fc; VL1-L1-VL2-L2-VH2-L3-VH1-L4-CL-Fc; VH1-L1-VH2-L2-VL2-L3-VL1-L4-CL-Fc; VL1-L1-VL2-L2-VH2-L3-VH1-L4-CH1-L5-CL-Fc; VH1-L1-VH2-L2-VL2-L3-VL1-L4-CH1-L5-CL-Fc; VL1-L1-VL2-L2-VH2-L3-VH1-L4-CL-L5-CH1-Fc; VH1-L1-VH2-L2-VL2-L3-VL1-L4-CL-L5-CH1-Fc; VL1-L1-VL2-L2-VH2-L3-VH1-L4-CH1-L5-Fc; VH1-L1-VH2-L2-VL2-L3-VL1-L4-CH1-L5-Fc; VL1-L1-VL2-L2-VH2-L3-VH1- L4-CL-L5-Fc; VH1-L1-VH2-L2-VL2-L3-VL1-L4-CL-L5-Fc; VL1-L1-VL2-L2-VH2-L3-VH1-L4-CH1-L5-CL-L6-Fc; VH1-L1-VH2-L2-VL2-L3-VL1-L4-CH1-L5-CL-L6-Fc; VL1-L1-VL2-L2-VH2-L3-VH1-L4-CL-L5-CH1-L6-Fc; or VH1-L1-VH2-L2-VL2-L3-VL1-L4-CL-L5-CH1-L6-Fc. In some aspects, the first polypeptide has a structure represented by VL1-L1-VL2-L2-VH2-L3-VH1-L4-CH1-Fc and the second polypeptide has a structure represented by VL1-VL2-VH2-VH1; VH1-VH2-VL2-VL1; VL1-L1-VL2-L2-VH2-L3-VH1; VH1-L1-VH2-L2-VL2-L3-VL1; VL1-VL2-VH2-VH1-Fc; VH1-VH2-VL2-VL1-Fc; VL1-L1-VL2-L2-VH2-L3-VH1-Fc; VH1-L1-VH2-L2-VL2-L3-VL1-Fc; VL1-L1-VL2-L2-VH2-L3-VH1-L4-Fc; VH1-L1-VH2-L2-VL2-L3-VL1-L4-Fc; VL1-VL2-VH2-VH1-CH1; VH1-VH2-VL2-VL1-CH1; VL1-VL2-VH2-VH1-CL; VH1-VH2-VL2-VL1-CL; VL1-VL2-VH2-VH1-CH1-CL; VH1-VH2-VL2-VL1-CH1-CL; VL1-VL2-VH2-VH1-CL-CH1; VH1-VH2-VL2-VL1-CL-CH1; VL1-L1-VL2-L2-VH2-L3-VH1-L4-CH1; VH1-L1-VH2-L2-VL2-L3-VL1-L4-CH1; VL1-L1-VL2-L2-VH2-L3-VH1-L4-CL; VH1-L1-VH2-L2-VL2- L3-VL1-L4-CL; VL1-L1-VL2-L2-VH2-L3-VH1-L4-CH1-L5-CL; VH1-L1-VH2-L2-VL2-L3-VL1-L4-CH1-L5-CL; VL1-L1-VL2-L2-VH2-L3-VH1-L4-CL-L5-CH1; VH1-L1-VH2-L2-VL2-L3-VL1-L4-CL-L5-CH1; VL1-VL2-VH2-VH1-CH1-Fc; VH1-VH2-VL2-VL1-CH1-Fc; VL1-VL2-VH2-VH1-CL-Fc; VH1-VH2-VL2-VL1-CL-Fc; VL1-VL2-VH2-VH1-CH1-CL-Fc; VH1-VH2-VL2-VL1-CH1-CL-Fc; VL1-VL2-VH2-VH1-CL-CH1-Fc; VH1-VH2-VL2-VL1-CL-CH1-Fc; VL1-L1-VL2-L2-VH2-L3-VH1-L4-CH1-Fc; VH1-L1-VH2-L2-VL2-L3-VL1-L4-CH1-Fc; VL1-L1-VL2-L2-VH2-L3-VH1-L4-CL-Fc; VH1-L1-VH2-L2-VL2-L3-VL1-L4-CL-Fc; VL1-L1-VL2-L2-VH2-L3-VH1-L4-CH1-L5-CL- Fc; VH1-L1-VH2-L2-VL2-L3-VL1-L4-CH1-L5-CL-Fc; VL1-L1-VL2-L2-VH2-L3-VH1-L4-CL-L5-CH1-Fc; VH1-L1-VH2-L2-VL2-L3-VL1-L4-CL-L5-CH1-Fc; VL1-L1-VL2-L2-VH2-L3-VH1-L4-CH1-L5-Fc; VH1-L1-VH2-L2-VL2-L3-VL1-L4-CH1-L5-Fc; VL1-L1-VL2-L2-VH2-L3-VH1-L4-CL-L5-Fc; VH1-L1-VH2-L2-VL2-L3-VL1-L4-CL-L5-Fc; VL1-L1-VL2-L2-VH2-L3-VH1-L4-CH1-L5-CL-L6-Fc; VH1-L1-VH2-L2-VL2-L3-VL1-L4-CH1-L5-CL-L6-Fc; VL1-L1-VL2-L2-VH2-L3-VH1-L4-CL-L5-CH1-L6-Fc; or VH1-L1-VH2-L2-VL2-L3-VL1-L4-CL-L5-CH1-L6-Fc. In some aspects, the first polypeptide has a structure represented by VH1-L1-VH2-L2-VL2-L3-VL1-L4-CH1-Fc and the second polypeptide has a structure represented by VL1-VL2-VH2-VH1; VH1-VH2-VL2-VL1; VL1-L1-VL2-L2-VH2-L3-VH1; VH1-L1-VH2-L2-VL2-L3-VL1; VL1-VL2-VH2-VH1-Fc; VH1-VH2-VL2-VL1-Fc; VL1-L1-VL2-L2-VH2-L3-VH1-Fc; VH1-L1-VH2-L2-VL2-L3-VL1-Fc; VL1-L1-VL2-L2-VH2-L3-VH1-L4-Fc; VH1-L1-VH2-L2-VL2-L3-VL1-L4-Fc; VL1-VL2-VH2-VH1-CH1; VH1-VH2-VL2-VL1-CH1; VL1-VL2-VH2-VH1-CL; VH1-VH2-VL2-VL1-CL; VL1-VL2-VH2-VH1-CH1-CL; VH1-VH2-VL2-VL1-CH1-CL; VL1-VL2-VH2-VH1-CL-CH1; VH1-VH2-VL2-VL1-CL-CH1; VL1-L1-VL2-L2-VH2-L3-VH1-L4-CH1; VH1-L1-VH2-L2-VL2-L3-VL1-L4-CH1; VL1-L1-VL2-L2-VH2-L3-VH1-L4-CL; VH1-L1-VH2-L2-VL2-L3-VL1-L4-CL; VL1-L1-VL2-L2-VH2-L3-VH1-L4-CH1-L5-CL; VH1-L1-VH2-L2-VL2-L3-VL1-L4-CH1-L5-CL; VL1-L1-VL2-L2-VH2-L3-VH1-L4-CL-L5-CH1; VH1-L1-VH2-L2-VL2-L3-VL1- L4-CL-L5-CH1; VL1-VL2-VH2-VH1-CH1-Fc; VH1-VH2-VL2-VL1-CH1-Fc; VL1-VL2-VH2-VH1-CL-Fc; VH1-VH2-VL2-VL1-CL-Fc; VL1-VL2-VH2-VH1-CH1-CL-Fc; VH1-VH2-VL2-VL1-CH1-CL-Fc; VL1-VL2-VH2-VH1-CL-CH1-Fc; VH1-VH2-VL2-VL1-CL-CH1-Fc; VL1-L1-VL2-L2-VH2-L3-VH1-L4-CH1-Fc; VH1-L1-VH2-L2-VL2-L3-VL1-L4-CH1-Fc; VL1-L1-VL2-L2-VH2-L3-VH1-L4-CL-Fc; VH1-L1-VH2-L2-VL2-L3-VL1-L4-CL-Fc; VL1-L1-VL2-L2-VH2-L3-VH1-L4-CH1-L5-CL-Fc; VH1-L1-VH2-L2-VL2-L3-VL1-L4-CH1-L5-CL-Fc; VL1-L1-VL2-L2-VH2-L3-VH1-L4-CL-L5-CH1-Fc; VH1-L1-VH2-L2-VL2-L3-VL1-L4-CL-L5-CH1-Fc; VL1-L1-VL2-L2-VH2-L3-VH1-L4-CH1-L5-Fc; VH1-L1-VH2-L2-VL2-L3-VL1-L4-CH1-L5-Fc; VL1-L1-VL2-L2-VH2-L3-VH1-L4-CL-L5-Fc; VH1-L1-VH2-L2-VL2-L3-VL1-L4-CL-L5-Fc; VL1-L1-VL2-L2-VH2-L3-VH1-L4-CH1-L5-CL-L6-Fc; VH1-L1-VH2-L2-VL2-L3-VL1-L4-CH1-L5-CL-L6-Fc; VL1-L1-VL2-L2-VH2-L3-VH1-L4-CL-L5-CH1-L6-Fc; or VH1-L1-VH2-L2-VL2-L3-VL1-L4-CL-L5-CH1-L6-Fc. In some aspects, the first polypeptide has a structure represented by VL1-L1-VL2-L2-VH2-L3-VH1-L4-CL-Fc and the second polypeptide has a structure represented by VL1-VL2-VH2-VH1; VH1-VH2-VL2-VL1; VL1-L1-VL2-L2-VH2-L3-VH1; VH1-L1-VH2-L2-VL2-L3-VL1; VL1-VL2-VH2-VH1-Fc; VH1-VH2-VL2-VL1-Fc; VL1-L1-VL2-L2-VH2-L3-VH1-Fc; VH1-L1-VH2-L2-VL2-L3-VL1-Fc; VL1-L1-VL2-L2-VH2-L3-VH1-L4-Fc; VH1-L1-VH2-L2-VL2-L3-VL1-L4-Fc; VL1-VL2-VH2-VH1-CH1; VH1-VH2-VL2-VL1-CH1; VL1-VL2-VH2-VH1-CL; VH1-VH2-VL2-VL1-CL; VL1-VL2-VH2-VH1-CH1-CL; VH1-VH2-VL2-VL1-CH1-CL; VL1-VL2-VH2-VH1-CL-CH1; VH1-VH2-VL2-VL1-CL-CH1; VL1-L1-VL2-L2-VH2-L3-VH1-L4-CH1; VH1-L1-VH2-L2-VL2-L3-VL1-L4-CH1; VL1-L1-VL2-L2-VH2-L3-VH1-L4-CL; VH1-L1-VH2-L2-VL2-L3-VL1-L4-CL; VL1-L1-VL2-L2- VH2-L3-VH1-L4-CH1-L5-CL; VH1-L1-VH2-L2-VL2-L3-VL1-L4-CH1-L5-CL; VL1-L1-VL2-L2-VH2-L3-VH1-L4- CL-L5-CH1; VH1-L1-VH2-L2-VL2-L3-VL1-L4-CL-L5-CH1; VL1-VL2-VH2-VH1-CH1-Fc; VH1-VH2-VL2-VL1-CH1-Fc; VL1-VL2-VH2-VH1-CL-Fc; VH1-VH2-VL2-VL1-CL-Fc; VL1-VL2-VH2-VH1-CH1-CL-Fc; VH1-VH2-VL2-VL1-CH1-CL-Fc; VL1-VL2-VH2-VH1-CL-CH1-Fc; VH1-VH2-VL2-VL1-CL-CH1-Fc; VL1-L1-VL2-L2-VH2-L3-VH1-L4-CH1-Fc; VH1-L1-VH2-L2-VL2-L3-VL1-L4-CH1-Fc; VL1-L1-VL2-L2-VH2-L3-VH1-L4-CL-Fc; VH1-L1-VH2-L2-VL2-L3-VL1-L4-CL-Fc; VL1-L1-VL2-L2-VH2-L3-VH1-L4-CH1-L5-CL-Fc; VH1-L1-VH2-L2-VL2-L3-VL1-L4-CH1-L5-CL-Fc; VL1-L1-VL2-L2-VH2-L3-VH1-L4-CL-L5-CH1-Fc; VH1-L1-VH2-L2-VL2-L3-VL1-L4-CL-L5-CH1-Fc; VL1-L1-VL2-L2-VH2-L3-VH1-L4-CH1-L5-Fc; VH1-L1-VH2-L2-VL2-L3-VL1-L4-CH1-L5-Fc; VL1-L1-VL2-L2-VH2-L3-VH1-L4-CL-L5-Fc; VH1-L1-VH2-L2-VL2-L3-VL1-L4-CL-L5-Fc; VL1-L1-VL2-L2-VH2-L3-VH1-L4-CH1-L5-CL-L6-Fc; VH1-L1-VH2-L2-VL2-L3-VL1-L4-CH1-L5-CL-L6-Fc; VL1-L1-VL2-L2-VH2-L3-VH1-L4-CL-L5-CH1-L6-Fc; or VH1-L1-VH2-L2-VL2-L3-VL1-L4-CL-L5-CH1-L6-Fc. In some aspects, the first polypeptide has a structure represented by VH1-L1-VH2-L2-VL2-L3-VL1-L4-CL-Fc and the second polypeptide has a structure represented by VL1-VL2-VH2-VH1; VH1-VH2-VL2-VL1; VL1-L1-VL2-L2-VH2-L3-VH1; VH1-L1-VH2-L2-VL2-L3-VL1; VL1-VL2-VH2-VH1-Fc; VH1-VH2-VL2-VL1-Fc; VL1-L1-VL2-L2-VH2-L3-VH1-Fc; VH1-L1-VH2-L2-VL2-L3-VL1-Fc; VL1-L1-VL2-L2-VH2-L3-VH1-L4-Fc; VH1-L1-VH2-L2-VL2-L3-VL1-L4-Fc; VL1-VL2-VH2-VH1-CH1; VH1-VH2-VL2-VL1-CH1; VL1-VL2-VH2-VH1-CL; VH1-VH2-VL2-VL1-CL; VL1-VL2-VH2-VH1-CH1-CL; VH1-VH2-VL2-VL1-CH1-CL; VL1-VL2-VH2-VH1-CL-CH1; VH1-VH2-VL2-VL1-CL-CH1; VL1-L1-VL2-L2-VH2-L3-VH1-L4-CH1; VH1-L1-VH2-L2-VL2-L3-VL1-L4-CH1; VL1-L1-VL2-L2-VH2-L3-VH1-L4-CL; VH1-L1- VH2-L2-VL2-L3-VL1-L4-CL; VL1-L1-VL2-L2-VH2-L3-VH1-L4-CH1-L5-CL; VH1-L1-VH2-L2-VL2-L3-VL1-L4-CH1- L5-CL; VL1-L1-VL2-L2-VH2-L3-VH1-L4-CL-L5-CH1; VH1-L1-VH2-L2-VL2-L3-VL1-L4-CL-L5-CH1; VL1-VL2-VH2-VH1-CH1-Fc; VH1-VH2-VL2-VL1-CH1-Fc; VL1-VL2-VH2-VH1-CL-Fc; VH1-VH2-VL2-VL1-CL-Fc; VL1-VL2-VH2-VH1-CH1-CL-Fc; VH1-VH2-VL2-VL1-CH1-CL-Fc; VL1-VL2-VH2-VH1-CL-CH1-Fc; VH1-VH2-VL2-VL1-CL-CH1-Fc; VL1-L1-VL2-L2-VH2-L3-VH1-L4-CH1-Fc; VH1-L1-VH2-L2-VL2-L3-VL1-L4-CH1-Fc; VL1-L1-VL2-L2-VH2-L3-VH1-L4-CL-Fc; VH1-L1-VH2-L2-VL2-L3-VL1-L4-CL-Fc; VL1-L1-VL2-L2-VH2-L3-VH1-L4-CH1-L5-CL-Fc; VH1-L1-VH2-L2-VL2-L3-VL1-L4-CH1-L5-CL-Fc; VL1-L1-VL2-L2-VH2-L3-VH1-L4-CL-L5-CH1-Fc; VH1-L1-VH2-L2-VL2-L3-VL1-L4-CL-L5-CH1-Fc; VL1-L1-VL2-L2-VH2-L3-VH1-L4-CH1-L5-Fc; VH1-L1-VH2-L2-VL2-L3-VL1-L4-CH1-L5-Fc; VL1-L1-VL2-L2-VH2-L3-VH1-L4-CL-L5-Fc; VH1-L1-VH2-L2-VL2-L3-VL1-L4-CL-L5-Fc; VL1-L1-VL2-L2-VH2-L3-VH1-L4-CH1-L5-CL-L6-Fc; VH1-L1-VH2-L2-VL2-L3-VL1-L4-CH1-L5-CL-L6-Fc; VL1-L1-VL2-L2-VH2-L3-VH1-L4-CL-L5-CH1-L6-Fc; or VH1-L1-VH2-L2-VL2-L3-VL1-L4-CL-L5-CH1-L6-Fc. In some aspects, the first polypeptide has a structure represented by VL1-L1-VL2-L2-VH2-L3-VH1-L4-CH1-L5-CL-Fc and the second polypeptide has a structure represented by VL1-VL2-VH2-VH1; VH1-VH2-VL2-VL1; VL1-L1-VL2-L2-VH2-L3-VH1; VH1-L1-VH2-L2-VL2-L3-VL1; VL1-VL2-VH2-VH1-Fc; VH1-VH2-VL2-VL1-Fc; VL1-L1-VL2-L2-VH2-L3-VH1-Fc; VH1-L1-VH2-L2-VL2-L3-VL1-Fc; VL1-L1-VL2-L2-VH2-L3-VH1-L4-Fc; VH1-L1-VH2-L2-VL2-L3-VL1-L4-Fc; VL1-VL2-VH2-VH1-CH1; VH1-VH2-VL2-VL1-CH1; VL1-VL2-VH2-VH1-CL; VH1-VH2-VL2-VL1-CL; VL1-VL2-VH2-VH1-CH1-CL; VH1-VH2-VL2-VL1-CH1-CL; VL1-VL2-VH2-VH1-CL-CH1; VH1-VH2-VL2-VL1-CL-CH1; VL1-L1-VL2-L2-VH2-L3-VH1-L4-CH1; VH1-L1-VH2-L2-VL2-L3-VL1-L4-CH1; VL1- L1-VL2-L2-VH2-L3-VH1-L4-CL; VH1-L1-VH2-L2-VL2-L3-VL1-L4-CL; VL1-L1-VL2-L2-VH2-L3-VH1-L4-CH1- L5-CL; VH1-L1-VH2-L2-VL2-L3-VL1-L4-CH1-L5-CL; VL1-L1-VL2-L2-VH2-L3-VH1-L4-CL-L5-CH1; VH1-L1-VH2-L2-VL2-L3-VL1-L4-CL-L5-CH1; VL1-VL2-VH2-VH1-CH1-Fc; VH1-VH2-VL2-VL1-CH1-Fc; VL1-VL2-VH2-VH1-CL-Fc; VH1-VH2-VL2-VL1-CL-Fc; VL1-VL2-VH2-VH1-CH1-CL-Fc; VH1-VH2-VL2-VL1-CH1-CL-Fc; VL1-VL2-VH2-VH1-CL-CH1-Fc; VH1-VH2-VL2-VL1-CL-CH1-Fc; VL1-L1-VL2-L2-VH2-L3-VH1-L4-CH1-Fc; VH1-L1-VH2-L2-VL2-L3-VL1-L4-CH1-Fc; VL1-L1-VL2-L2-VH2-L3-VH1-L4-CL-Fc; VH1-L1-VH2-L2-VL2-L3-VL1-L4-CL-Fc; VL1-L1-VL2-L2-VH2-L3-VH1-L4-CH1-L5-CL-Fc; VH1-L1-VH2-L2-VL2-L3-VL1-L4-CH1-L5-CL-Fc; VL1-L1-VL2-L2-VH2-L3-VH1-L4-CL-L5-CH1-Fc; VH1-L1-VH2-L2-VL2-L3-VL1-L4-CL-L5-CH1-Fc; VL1-L1-VL2-L2-VH2-L3-VH1-L4-CH1-L5-Fc; VH1-L1-VH2-L2-VL2-L3-VL1-L4-CH1-L5-Fc; VL1-L1-VL2-L2-VH2-L3-VH1- L4-CL-L5-Fc; VH1-L1-VH2-L2-VL2-L3-VL1-L4-CL-L5-Fc; VL1-L1-VL2-L2-VH2-L3-VH1-L4-CH1-L5-CL-L6-Fc; VH1-L1-VH2-L2-VL2-L3-VL1-L4-CH1-L5-CL-L6-Fc; VL1-L1-VL2-L2-VH2-L3-VH1-L4-CL-L5-CH1-L6-Fc; or VH1-L1-VH2-L2-VL2-L3-VL1-L4-CL-L5-CH1-L6-Fc. In some aspects, the first polypeptide has a structure represented by VH1-L1-VH2-L2-VL2-L3-VL1-L4-CH1-L5-CL-Fc and the second polypeptide has a structure represented by VL1-VL2-VH2-VH1; VH1-VH2-VL2-VL1; VL1-L1-VL2-L2-VH2-L3-VH1; VH1-L1-VH2-L2-VL2-L3-VL1; VL1-VL2-VH2-VH1-Fc; VH1-VH2-VL2-VL1-Fc; VL1-L1-VL2-L2-VH2-L3-VH1-Fc; VH1-L1-VH2-L2-VL2-L3-VL1-Fc; VL1-L1-VL2-L2-VH2-L3-VH1-L4-Fc; VH1-L1-VH2-L2-VL2-L3-VL1-L4-Fc; VL1-VL2-VH2-VH1-CH1; VH1-VH2-VL2-VL1-CH1; VL1-VL2-VH2-VH1-CL; VH1-VH2-VL2-VL1-CL; VL1-VL2-VH2-VH1-CH1-CL; VH1-VH2-VL2-VL1-CH1-CL; VL1-VL2-VH2-VH1-CL-CH1; VH1-VH2-VL2-VL1-CL-CH1; VL1-L1-VL2-L2-VH2-L3-VH1-L4-CH1; VH1-L1-VH2-L2-VL2-L3-VL1-L4-CH1; VL1-L1-VL2-L2-VH2-L3-VH1-L4-CL; VH1-L1- VH2-L2-VL2-L3-VL1-L4-CL; VL1-L1-VL2-L2-VH2-L3-VH1-L4-CH1-L5-CL; VH1-L1-VH2-L2-VL2-L3-VL1-L4-CH1- L5-CL; VL1-L1-VL2-L2-VH2-L3-VH1-L4-CL-L5-CH1; VH1-L1-VH2-L2-VL2-L3-VL1-L4-CL-L5-CH1; VL1-VL2-VH2-VH1-CH1-Fc; VH1-VH2-VL2-VL1-CH1-Fc; VL1-VL2-VH2-VH1-CL-Fc; VH1-VH2-VL2-VL1-CL-Fc; VL1-VL2-VH2-VH1-CH1-CL-Fc; VH1-VH2-VL2-VL1-CH1-CL-Fc; VL1-VL2-VH2-VH1-CL-CH1-Fc; VH1-VH2-VL2-VL1-CL-CH1-Fc; VL1-L1-VL2-L2-VH2-L3-VH1-L4-CH1-Fc; VH1-L1-VH2-L2-VL2-L3-VL1-L4-CH1-Fc; VL1-L1-VL2-L2-VH2-L3-VH1-L4-CL-Fc; VH1-L1-VH2-L2-VL2-L3-VL1-L4-CL-Fc; VL1-L1-VL2-L2-VH2-L3-VH1-L4-CH1-L5-CL-Fc; VH1-L1-VH2-L2-VL2-L3-VL1-L4-CH1-L5-CL-Fc; VL1-L1-VL2-L2-VH2-L3-VH1-L4-CL-L5-CH1-Fc; VH1-L1-VH2-L2-VL2-L3-VL1-L4-CL-L5-CH1-Fc; VL1-L1-VL2-L2-VH2-L3-VH1-L4-CH1-L5-Fc; VH1-L1-VH2-L2-VL2-L3-VL1-L4-CH1-L5-Fc; VL1-L1-VL2-L2-VH2-L3-VH1-L4-CL-L5-Fc; VH1-L1-VH2-L2-VL2-L3-VL1-L4-CL-L5-Fc; VL1-L1-VL2-L2-VH2-L3-VH1-L4-CH1-L5-CL-L6-Fc; VH1-L1-VH2-L2-VL2-L3-VL1-L4-CH1-L5-CL-L6-Fc; VL1-L1-VL2-L2-VH2-L3-VH1-L4-CL-L5-CH1-L6-Fc; or VH1-L1-VH2-L2-VL2-L3-VL1-L4-CL-L5-CH1-L6-Fc. In some aspects, the first polypeptide has a structure represented by VL1-L1-VL2-L2-VH2-L3-VH1-L4-CL-L5-CH1-Fc and the second polypeptide has a structure represented by VL1-VL2-VH2-VH1; VH1-VH2-VL2-VL1; VL1-L1-VL2-L2-VH2-L3-VH1; VH1-L1-VH2-L2-VL2-L3-VL1; VL1-VL2-VH2-VH1-Fc; VH1-VH2-VL2-VL1-Fc; VL1-L1-VL2-L2-VH2-L3-VH1-Fc; VH1-L1-VH2-L2-VL2-L3-VL1-Fc; VL1-L1-VL2-L2-VH2-L3-VH1-L4-Fc; VH1-L1-VH2-L2-VL2-L3-VL1-L4-Fc; VL1-VL2-VH2-VH1-CH1; VH1-VH2-VL2-VL1-CH1; VL1-VL2-VH2-VH1-CL; VH1-VH2-VL2-VL1-CL; VL1-VL2-VH2-VH1-CH1-CL; VH1-VH2-VL2-VL1-CH1-CL; VL1-VL2-VH2-VH1-CL-CH1; VH1-VH2-VL2-VL1-CL-CH1; VL1-L1-VL2-L2-VH2-L3-VH1-L4-CH1; VH1-L1-VH2-L2-VL2-L3-VL1-L4-CH1; VL1- L1-VL2-L2-VH2-L3-VH1-L4-CL; VH1-L1-VH2-L2-VL2-L3-VL1-L4-CL; VL1-L1-VL2-L2-VH2-L3-VH1-L4-CH1- L5-CL; VH1-L1-VH2-L2-VL2-L3-VL1-L4-CH1-L5-CL; VL1-L1-VL2-L2-VH2-L3-VH1-L4-CL-L5-CH1; VH1-L1-VH2-L2-VL2-L3-VL1-L4-CL-L5-CH1; VL1-VL2-VH2-VH1-CH1-Fc; VH1-VH2-VL2-VL1-CH1-Fc; VL1-VL2-VH2-VH1-CL-Fc; VH1-VH2-VL2-VL1-CL-Fc; VL1-VL2-VH2-VH1-CH1-CL-Fc; VH1-VH2-VL2-VL1-CH1-CL-Fc; VL1-VL2-VH2-VH1-CL-CH1-Fc; VH1-VH2-VL2-VL1-CL-CH1-Fc; VL1-L1-VL2-L2-VH2-L3-VH1-L4-CH1-Fc; VH1-L1-VH2-L2-VL2-L3-VL1-L4-CH1-Fc; VL1-L1-VL2-L2-VH2-L3-VH1-L4-CL-Fc; VH1-L1-VH2-L2-VL2-L3-VL1-L4-CL-Fc; VL1-L1-VL2-L2-VH2-L3-VH1-L4-CH1-L5-CL-Fc; VH1-L1-VH2-L2-VL2-L3-VL1-L4-CH1-L5-CL-Fc; VL1-L1-VL2-L2-VH2-L3-VH1-L4-CL-L5-CH1-Fc; VH1-L1-VH2-L2-VL2-L3-VL1-L4-CL-L5-CH1-Fc; VL1-L1-VL2-L2-VH2-L3-VH1-L4-CH1-L5-Fc; VH1-L1-VH2-L2-VL2-L3-VL1-L4-CH1-L5-Fc; VL1-L1-VL2-L2-VH2-L3-VH1- L4-CL-L5-Fc; VH1-L1-VH2-L2-VL2-L3-VL1-L4-CL-L5-Fc; VL1-L1-VL2-L2-VH2-L3-VH1-L4-CH1-L5-CL-L6-Fc; VH1-L1-VH2-L2-VL2-L3-VL1-L4-CH1-L5-CL-L6-Fc; VL1-L1-VL2-L2-VH2-L3-VH1-L4-CL-L5-CH1-L6-Fc; or VH1-L1-VH2-L2-VL2-L3-VL1-L4-CL-L5-CH1-L6-Fc. In some aspects, the first polypeptide has a structure represented by VH1-L1-VH2-L2-VL2-L3-VL1-L4-CL-L5-CH1-Fc and the second polypeptide has a structure represented by VL1-VL2-VH2-VH1; VH1-VH2-VL2-VL1; VL1-L1-VL2-L2-VH2-L3-VH1; VH1-L1-VH2-L2-VL2-L3-VL1; VL1-VL2-VH2-VH1-Fc; VH1-VH2-VL2-VL1-Fc; VL1-L1-VL2-L2-VH2-L3-VH1-Fc; VH1-L1-VH2-L2-VL2-L3-VL1-Fc; VL1-L1-VL2-L2-VH2-L3-VH1-L4-Fc; VH1-L1-VH2-L2-VL2-L3-VL1-L4-Fc; VL1-VL2-VH2-VH1-CH1; VH1-VH2-VL2-VL1-CH1; VL1-VL2-VH2-VH1-CL; VH1-VH2-VL2-VL1-CL; VL1-VL2-VH2-VH1-CH1-CL; VH1-VH2-VL2-VL1-CH1-CL; VL1-VL2-VH2-VH1-CL-CH1; VH1-VH2-VL2-VL1-CL-CH1; VL1-L1-VL2-L2-VH2-L3-VH1-L4-CH1; VH1-L1-VH2-L2-VL2-L3-VL1-L4-CH1; VL1-L1-VL2-L2-VH2-L3-VH1-L4-CL; VH1-L1- VH2-L2-VL2-L3-VL1-L4-CL; VL1-L1-VL2-L2-VH2-L3-VH1-L4-CH1-L5-CL; VH1-L1-VH2-L2-VL2-L3-VL1-L4-CH1- L5-CL; VL1-L1-VL2-L2-VH2-L3-VH1-L4-CL-L5-CH1; VH1-L1-VH2-L2-VL2-L3-VL1-L4-CL-L5-CH1; VL1-VL2-VH2-VH1-CH1-Fc; VH1-VH2-VL2-VL1-CH1-Fc; VL1-VL2-VH2-VH1-CL-Fc; VH1-VH2-VL2-VL1-CL-Fc; VL1-VL2-VH2-VH1-CH1-CL-Fc; VH1-VH2-VL2-VL1-CH1-CL-Fc; VL1-VL2-VH2-VH1-CL-CH1-Fc; VH1-VH2-VL2-VL1-CL-CH1-Fc; VL1-L1-VL2-L2-VH2-L3-VH1-L4-CH1-Fc; VH1-L1-VH2-L2-VL2-L3-VL1-L4-CH1-Fc; VL1-L1-VL2-L2-VH2-L3-VH1-L4-CL-Fc; VH1-L1-VH2-L2-VL2-L3-VL1-L4-CL-Fc; VL1-L1-VL2-L2-VH2-L3-VH1-L4-CH1-L5-CL-Fc; VH1-L1-VH2-L2-VL2-L3-VL1-L4-CH1-L5-CL-Fc; VL1-L1-VL2-L2-VH2-L3-VH1-L4-CL-L5-CH1-Fc; VH1-L1-VH2-L2-VL2-L3-VL1-L4-CL-L5-CH1-Fc; VL1-L1-VL2-L2-VH2-L3-VH1-L4-CH1-L5-Fc; VH1-L1-VH2-L2-VL2-L3-VL1-L4-CH1-L5-Fc; VL1-L1-VL2-L2-VH2-L3-VH1-L4-CL-L5-Fc; VH1-L1-VH2-L2-VL2-L3-VL1-L4-CL-L5-Fc; VL1-L1-VL2-L2-VH2-L3-VH1-L4-CH1-L5-CL-L6-Fc; VH1-L1-VH2-L2-VL2-L3-VL1-L4-CH1-L5-CL-L6-Fc; VL1-L1-VL2-L2-VH2-L3-VH1-L4-CL-L5-CH1-L6-Fc; or VH1-L1-VH2-L2-VL2-L3-VL1-L4-CL-L5-CH1-L6-Fc. In some aspects, the first polypeptide has a structure represented by VL1-L1-VL2-L2-VH2-L3-VH1-L4-CH1-L5-Fc and the second polypeptide has a structure represented by VL1-VL2-VH2-VH1; VH1-VH2-VL2-VL1; VL1-L1-VL2-L2-VH2-L3-VH1; VH1-L1-VH2-L2-VL2-L3-VL1; VL1-VL2-VH2-VH1-Fc; VH1-VH2-VL2-VL1-Fc; VL1-L1-VL2-L2-VH2-L3-VH1-Fc; VH1-L1-VH2-L2-VL2-L3-VL1-Fc; VL1-L1-VL2-L2-VH2-L3-VH1-L4-Fc; VH1-L1-VH2-L2-VL2-L3-VL1-L4-Fc; VL1-VL2-VH2-VH1-CH1; VH1-VH2-VL2-VL1-CH1; VL1-VL2-VH2-VH1-CL; VH1-VH2-VL2-VL1-CL; VL1-VL2-VH2-VH1-CH1-CL; VH1-VH2-VL2-VL1-CH1-CL; VL1-VL2-VH2-VH1-CL-CH1; VH1-VH2-VL2-VL1-CL-CH1; VL1-L1-VL2-L2-VH2-L3-VH1-L4-CH1; VH1-L1-VH2-L2-VL2-L3-VL1-L4-CH1; VL1- L1-VL2-L2-VH2-L3-VH1-L4-CL; VH1-L1-VH2-L2-VL2-L3-VL1-L4-CL; VL1-L1-VL2-L2-VH2-L3-VH1-L4-CH1- L5-CL; VH1-L1-VH2-L2-VL2-L3-VL1-L4-CH1-L5-CL; VL1-L1-VL2-L2-VH2-L3-VH1-L4-CL-L5-CH1; VH1-L1-VH2-L2-VL2-L3-VL1-L4-CL-L5-CH1; VL1-VL2-VH2-VH1-CH1-Fc; VH1-VH2-VL2-VL1-CH1-Fc; VL1-VL2-VH2-VH1-CL-Fc; VH1-VH2-VL2-VL1-CL-Fc; VL1-VL2-VH2-VH1-CH1-CL-Fc; VH1-VH2-VL2-VL1-CH1-CL-Fc; VL1-VL2-VH2-VH1-CL-CH1-Fc; VH1-VH2-VL2-VL1-CL-CH1-Fc; VL1-L1-VL2-L2-VH2-L3-VH1-L4-CH1-Fc; VH1-L1-VH2-L2-VL2-L3-VL1-L4-CH1-Fc; VL1-L1-VL2-L2-VH2-L3-VH1-L4-CL-Fc; VH1-L1-VH2-L2-VL2-L3-VL1-L4-CL-Fc; VL1-L1-VL2-L2-VH2-L3-VH1-L4-CH1-L5-CL-Fc; VH1-L1-VH2-L2-VL2-L3-VL1-L4-CH1-L5-CL-Fc; VL1-L1-VL2-L2-VH2-L3-VH1-L4-CL-L5-CH1-Fc; VH1-L1-VH2-L2-VL2-L3-VL1-L4-CL-L5-CH1-Fc; VL1-L1-VL2-L2-VH2-L3-VH1-L4-CH1-L5-Fc; VH1-L1-VH2-L2-VL2-L3-VL1-L4-CH1-L5-Fc; VL1-L1-VL2-L2-VH2-L3-VH1- L4-CL-L5-Fc; VH1-L1-VH2-L2-VL2-L3-VL1-L4-CL-L5-Fc; VL1-L1-VL2-L2-VH2-L3-VH1-L4-CH1-L5-CL-L6-Fc; VH1-L1-VH2-L2-VL2-L3-VL1-L4-CH1-L5-CL-L6-Fc; VL1-L1-VL2-L2-VH2-L3-VH1-L4-CL-L5-CH1-L6-Fc; or VH1-L1-VH2-L2-VL2-L3-VL1-L4-CL-L5-CH1-L6-Fc. In some aspects, the first polypeptide has a structure represented by VH1-L1-VH2-L2-VL2-L3-VL1-L4-CH1-L5-Fc and the second polypeptide has a structure represented by VL1-VL2-VH2-VH1; VH1-VH2-VL2-VL1; VL1-L1-VL2-L2-VH2-L3-VH1; VH1-L1-VH2-L2-VL2-L3-VL1; VL1-VL2-VH2-VH1-Fc; VH1-VH2-VL2-VL1-Fc; VL1-L1-VL2-L2-VH2-L3-VH1-Fc; VH1-L1-VH2-L2-VL2-L3-VL1-Fc; VL1-L1-VL2-L2-VH2-L3-VH1-L4-Fc; VH1-L1-VH2-L2-VL2-L3-VL1-L4-Fc; VL1-VL2-VH2-VH1-CH1; VH1-VH2-VL2-VL1-CH1; VL1-VL2-VH2-VH1-CL; VH1-VH2-VL2-VL1-CL; VL1-VL2-VH2-VH1-CH1-CL; VH1-VH2-VL2-VL1-CH1-CL; VL1-VL2-VH2-VH1-CL-CH1; VH1-VH2-VL2-VL1-CL-CH1; VL1-L1-VL2-L2-VH2-L3-VH1-L4-CH1; VH1-L1-VH2-L2-VL2-L3-VL1-L4-CH1; VL1-L1-VL2-L2-VH2-L3-VH1-L4-CL; VH1-L1-VH2-L2-VL2- L3-VL1-L4-CL; VL1-L1-VL2-L2-VH2-L3-VH1-L4-CH1-L5-CL; VH1-L1-VH2-L2-VL2-L3-VL1-L4-CH1-L5-CL; VL1-L1-VL2-L2-VH2-L3-VH1-L4-CL-L5-CH1; VH1-L1-VH2-L2-VL2-L3-VL1-L4-CL-L5-CH1; VL1-VL2-VH2-VH1-CH1-Fc; VH1-VH2-VL2-VL1-CH1-Fc; VL1-VL2-VH2-VH1-CL-Fc; VH1-VH2-VL2-VL1-CL-Fc; VL1-VL2-VH2-VH1-CH1-CL-Fc; VH1-VH2-VL2-VL1-CH1-CL-Fc; VL1-VL2-VH2-VH1-CL-CH1-Fc; VH1-VH2-VL2-VL1-CL-CH1-Fc; VL1-L1-VL2-L2-VH2-L3-VH1-L4-CH1-Fc; VH1-L1-VH2-L2-VL2-L3-VL1-L4-CH1-Fc; VL1-L1-VL2-L2-VH2-L3-VH1-L4-CL-Fc; VH1-L1-VH2-L2-VL2-L3-VL1-L4-CL-Fc; VL1-L1-VL2-L2-VH2-L3-VH1-L4-CH1-L5-CL- Fc; VH1-L1-VH2-L2-VL2-L3-VL1-L4-CH1-L5-CL-Fc; VL1-L1-VL2-L2-VH2-L3-VH1-L4-CL-L5-CH1-Fc; VH1-L1-VH2-L2-VL2-L3-VL1-L4-CL-L5-CH1-Fc; VL1-L1-VL2-L2-VH2-L3-VH1-L4-CH1-L5-Fc; VH1-L1-VH2-L2-VL2-L3-VL1-L4-CH1-L5-Fc; VL1-L1-VL2-L2-VH2-L3-VH1-L4-CL-L5-Fc; VH1-L1-VH2-L2-VL2-L3-VL1-L4-CL-L5-Fc; VL1-L1-VL2-L2-VH2-L3-VH1-L4-CH1-L5-CL-L6-Fc; VH1-L1-VH2-L2-VL2-L3-VL1-L4-CH1-L5-CL-L6-Fc; VL1-L1-VL2-L2-VH2-L3-VH1-L4-CL-L5-CH1-L6-Fc; or VH1-L1-VH2-L2-VL2-L3-VL1-L4-CL-L5-CH1-L6-Fc. In some aspects, the first polypeptide has a structure represented by VL1-L1-VL2-L2-VH2-L3-VH1-L4-CL-L5-Fc and the second polypeptide has a structure represented by VL1-VL2-VH2-VH1; VH1-VH2-VL2-VL1; VL1-L1-VL2-L2-VH2-L3-VH1; VH1-L1-VH2-L2-VL2-L3-VL1; VL1-VL2-VH2-VH1-Fc; VH1-VH2-VL2-VL1-Fc; VL1-L1-VL2-L2-VH2-L3-VH1-Fc; VH1-L1-VH2-L2-VL2-L3-VL1-Fc; VL1-L1-VL2-L2-VH2-L3-VH1-L4-Fc; VH1-L1-VH2-L2-VL2-L3-VL1-L4-Fc; VL1-VL2-VH2-VH1-CH1; VH1-VH2-VL2-VL1-CH1; VL1-VL2-VH2-VH1-CL; VH1-VH2-VL2-VL1-CL; VL1-VL2-VH2-VH1-CH1-CL; VH1-VH2-VL2-VL1-CH1-CL; VL1-VL2-VH2-VH1-CL-CH1; VH1-VH2-VL2-VL1-CL-CH1; VL1-L1-VL2-L2-VH2-L3-VH1-L4-CH1; VH1-L1-VH2-L2-VL2-L3-VL1-L4-CH1; VL1-L1-VL2- L2-VH2-L3-VH1-L4-CL; VH1-L1-VH2-L2-VL2-L3-VL1-L4-CL; VL1-L1-VL2-L2-VH2-L3-VH1-L4-CH1-L5-CL; VH1-L1-VH2-L2-VL2-L3-VL1-L4-CH1-L5-CL; VL1-L1-VL2-L2-VH2-L3-VH1-L4-CL-L5-CH1; VH1-L1-VH2-L2- VL2-L3-VL1-L4-CL-L5-CH1; VL1-VL2-VH2-VH1-CH1-Fc; VH1-VH2-VL2-VL1-CH1-Fc; VL1-VL2-VH2-VH1-CL-Fc; VH1-VH2-VL2-VL1-CL-Fc; VL1-VL2-VH2-VH1-CH1-CL-Fc; VH1-VH2-VL2-VL1-CH1-CL-Fc; VL1-VL2-VH2-VH1-CL-CH1-Fc; VH1-VH2-VL2-VL1-CL-CH1-Fc; VL1-L1-VL2-L2-VH2-L3-VH1-L4-CH1-Fc; VH1-L1-VH2-L2-VL2-L3-VL1-L4-CH1-Fc; VL1-L1-VL2-L2-VH2-L3-VH1-L4-CL-Fc; VH1-L1-VH2-L2-VL2-L3-VL1-L4-CL-Fc; VL1-L1-VL2-L2-VH2-L3-VH1-L4-CH1-L5-CL-Fc; VH1-L1-VH2-L2-VL2-L3-VL1-L4-CH1-L5-CL-Fc; VL1-L1-VL2-L2-VH2-L3-VH1-L4-CL-L5-CH1-Fc; VH1-L1-VH2-L2-VL2-L3-VL1-L4-CL-L5-CH1-Fc; VL1-L1-VL2-L2-VH2-L3-VH1-L4-CH1-L5-Fc; VH1-L1-VH2-L2-VL2-L3-VL1-L4-CH1-L5-Fc; VL1-L1-VL2-L2-VH2-L3-VH1- L4-CL-L5-Fc; VH1-L1-VH2-L2-VL2-L3-VL1-L4-CL-L5-Fc; VL1-L1-VL2-L2-VH2-L3-VH1-L4-CH1-L5-CL-L6-Fc; VH1-L1-VH2-L2-VL2-L3-VL1-L4-CH1-L5-CL-L6-Fc; VL1-L1-VL2-L2-VH2-L3-VH1-L4-CL-L5-CH1-L6-Fc; or VH1-L1-VH2-L2-VL2-L3-VL1-L4-CL-L5-CH1-L6-Fc. In some aspects, the first polypeptide has a structure represented by VH1-L1-VH2-L2-VL2-L3-VL1-L4-CL-L5-Fc and the second polypeptide has a structure represented by VL1-VL2-VH2-VH1; VH1-VH2-VL2-VL1; VL1-L1-VL2-L2-VH2-L3-VH1; VH1-L1-VH2-L2-VL2-L3-VL1; VL1-VL2-VH2-VH1-Fc; VH1-VH2-VL2-VL1-Fc; VL1-L1-VL2-L2-VH2-L3-VH1-Fc; VH1-L1-VH2-L2-VL2-L3-VL1-Fc; VL1-L1-VL2-L2-VH2-L3-VH1-L4-Fc; VH1-L1-VH2-L2-VL2-L3-VL1-L4-Fc; VL1-VL2-VH2-VH1-CH1; VH1-VH2-VL2-VL1-CH1; VL1-VL2-VH2-VH1-CL; VH1-VH2-VL2-VL1-CL; VL1-VL2-VH2-VH1-CH1-CL; VH1-VH2-VL2-VL1-CH1-CL; VL1-VL2-VH2-VH1-CL-CH1; VH1-VH2-VL2-VL1-CL-CH1; VL1-L1-VL2-L2-VH2-L3-VH1-L4-CH1; VH1-L1-VH2-L2-VL2-L3-VL1-L4-CH1; VL1-L1-VL2-L2-VH2-L3-VH1-L4-CL; VH1-L1-VH2-L2-VL2- L3-VL1-L4-CL; VL1-L1-VL2-L2-VH2-L3-VH1-L4-CH1-L5-CL; VH1-L1-VH2-L2-VL2-L3-VL1-L4-CH1-L5-CL; VL1-L1-VL2-L2-VH2-L3-VH1-L4-CL-L5-CH1; VH1-L1-VH2-L2-VL2-L3-VL1-L4-CL-L5-CH1; VL1-VL2-VH2-VH1-CH1-Fc; VH1-VH2-VL2-VL1-CH1-Fc; VL1-VL2-VH2-VH1-CL-Fc; VH1-VH2-VL2-VL1-CL-Fc; VL1-VL2-VH2-VH1-CH1-CL-Fc; VH1-VH2-VL2-VL1-CH1-CL-Fc; VL1-VL2-VH2-VH1-CL-CH1-Fc; VH1-VH2-VL2-VL1-CL-CH1-Fc; VL1-L1-VL2-L2-VH2-L3-VH1-L4-CH1-Fc; VH1-L1-VH2-L2-VL2-L3-VL1-L4-CH1-Fc; VL1-L1-VL2-L2-VH2-L3-VH1-L4-CL-Fc; VH1-L1-VH2-L2-VL2-L3-VL1-L4-CL-Fc; VL1-L1-VL2-L2-VH2-L3-VH1-L4-CH1-L5-CL- Fc; VH1-L1-VH2-L2-VL2-L3-VL1-L4-CH1-L5-CL-Fc; VL1-L1-VL2-L2-VH2-L3-VH1-L4-CL-L5-CH1-Fc; VH1-L1-VH2-L2-VL2-L3-VL1-L4-CL-L5-CH1-Fc; VL1-L1-VL2-L2-VH2-L3-VH1-L4-CH1-L5-Fc; VH1-L1-VH2-L2-VL2-L3-VL1-L4-CH1-L5-Fc; VL1-L1-VL2-L2-VH2-L3-VH1-L4-CL-L5-Fc; VH1-L1-VH2-L2-VL2-L3-VL1-L4-CL-L5-Fc; VL1-L1-VL2-L2-VH2-L3-VH1-L4-CH1-L5-CL-L6-Fc; VH1-L1-VH2-L2-VL2-L3-VL1-L4-CH1-L5-CL-L6-Fc; VL1-L1-VL2-L2-VH2-L3-VH1-L4-CL-L5-CH1-L6-Fc; or VH1-L1-VH2-L2-VL2-L3-VL1-L4-CL-L5-CH1-L6-Fc. In some aspects, the first polypeptide has a structure represented by VL1-L1-VL2-L2-VH2-L3-VH1-L4-CH1-L5-CL-L6-Fc and the second polypeptide has a structure represented by VL1-VL2-VH2-VH1; VH1-VH2-VL2-VL1; VL1-L1-VL2-L2-VH2-L3-VH1; VH1-L1-VH2-L2-VL2-L3-VL1; VL1-VL2-VH2-VH1-Fc; VH1-VH2-VL2-VL1-Fc; VL1-L1-VL2-L2-VH2-L3-VH1-Fc; VH1-L1-VH2-L2-VL2-L3-VL1-Fc; VL1-L1-VL2-L2-VH2-L3-VH1-L4-Fc; VH1-L1-VH2-L2-VL2-L3-VL1-L4-Fc; VL1-VL2-VH2-VH1-CH1; VH1-VH2-VL2-VL1-CH1; VL1-VL2-VH2-VH1-CL; VH1-VH2-VL2-VL1-CL; VL1-VL2-VH2-VH1-CH1-CL; VH1-VH2-VL2-VL1-CH1-CL; VL1-VL2-VH2-VH1-CL-CH1; VH1-VH2-VL2-VL1-CL-CH1; VL1-L1-VL2-L2-VH2-L3-VH1-L4-CH1; VH1-L1-VH2-L2-VL2-L3-VL1-L4-CH1; VL1-L1- VL2-L2-VH2-L3-VH1-L4-CL; VH1-L1-VH2-L2-VL2-L3-VL1-L4-CL; VL1-L1-VL2-L2-VH2-L3-VH1-L4-CH1-L5- CL; VH1-L1-VH2-L2-VL2-L3-VL1-L4-CH1-L5-CL; VL1-L1-VL2-L2-VH2-L3-VH1-L4-CL-L5-CH1; VH1-L1-VH2- L2-VL2-L3-VL1-L4-CL-L5-CH1; VL1-VL2-VH2-VH1-CH1-Fc; VH1-VH2-VL2-VL1-CH1-Fc; VL1-VL2-VH2-VH1-CL-Fc; VH1-VH2-VL2-VL1-CL-Fc; VL1-VL2-VH2-VH1-CH1-CL-Fc; VH1-VH2-VL2-VL1-CH1-CL-Fc; VL1-VL2-VH2-VH1-CL-CH1-Fc; VH1-VH2-VL2-VL1-CL-CH1-Fc; VL1-L1-VL2-L2-VH2-L3-VH1-L4-CH1-Fc; VH1-L1-VH2-L2-VL2-L3-VL1-L4-CH1-Fc; VL1-L1-VL2-L2-VH2-L3-VH1-L4-CL-Fc; VH1-L1-VH2-L2-VL2-L3-VL1-L4-CL-Fc; VL1-L1-VL2-L2-VH2-L3-VH1-L4-CH1-L5-CL-Fc; VH1-L1-VH2-L2-VL2-L3-VL1-L4-CH1-L5-CL-Fc; VL1-L1-VL2-L2-VH2-L3-VH1-L4-CL-L5-CH1-Fc; VH1-L1-VH2-L2-VL2-L3-VL1-L4-CL-L5-CH1-Fc; VL1-L1-VL2-L2-VH2-L3-VH1-L4-CH1-L5-Fc; VH1-L1-VH2-L2-VL2-L3-VL1-L4-CH1-L5-Fc; VL1-L1-VL2-L2-VH2-L3-VH1- L4-CL-L5-Fc; VH1-L1-VH2-L2-VL2-L3-VL1-L4-CL-L5-Fc; VL1-L1-VL2-L2-VH2-L3-VH1-L4-CH1-L5-CL-L6-Fc; VH1-L1-VH2-L2-VL2-L3-VL1-L4-CH1-L5-CL-L6-Fc; VL1-L1-VL2-L2-VH2-L3-VH1-L4-CL-L5-CH1-L6-Fc; or VH1-L1-VH2-L2-VL2-L3-VL1-L4-CL-L5-CH1-L6-Fc. In some aspects, the first polypeptide has a structure represented by VH1-L1-VH2-L2-VL2-L3-VL1-L4-CH1-L5-CL-L6-Fc and the second polypeptide has a structure represented by VL1-VL2-VH2-VH1; VH1-VH2-VL2-VL1; VL1-L1-VL2-L2-VH2-L3-VH1; VH1-L1-VH2-L2-VL2-L3-VL1; VL1-VL2-VH2-VH1-Fc; VH1-VH2-VL2-VL1-Fc; VL1-L1-VL2-L2-VH2-L3-VH1-Fc; VH1-L1-VH2-L2-VL2-L3-VL1-Fc; VL1-L1-VL2-L2-VH2-L3-VH1-L4-Fc; VH1-L1-VH2-L2-VL2-L3-VL1-L4-Fc; VL1-VL2-VH2-VH1-CH1; VH1-VH2-VL2-VL1-CH1; VL1-VL2-VH2-VH1-CL; VH1-VH2-VL2-VL1-CL; VL1-VL2-VH2-VH1-CH1-CL; VH1-VH2-VL2-VL1-CH1-CL; VL1-VL2-VH2-VH1-CL-CH1; VH1-VH2-VL2-VL1-CL-CH1; VL1-L1-VL2-L2-VH2-L3-VH1-L4-CH1; VH1-L1-VH2-L2-VL2-L3-VL1-L4-CH1; VL1-L1-VL2-L2-VH2-L3-VH1-L4-CL; VH1-L1- VH2-L2-VL2-L3-VL1-L4-CL; VL1-L1-VL2-L2-VH2-L3-VH1-L4-CH1-L5-CL; VH1-L1-VH2-L2-VL2-L3-VL1-L4-CH1- L5-CL; VL1-L1-VL2-L2-VH2-L3-VH1-L4-CL-L5-CH1; VH1-L1-VH2-L2-VL2-L3-VL1-L4-CL-L5-CH1; VL1-VL2-VH2-VH1-CH1-Fc; VH1-VH2-VL2-VL1-CH1-Fc; VL1-VL2-VH2-VH1-CL-Fc; VH1-VH2-VL2-VL1-CL-Fc; VL1-VL2-VH2-VH1-CH1-CL-Fc; VH1-VH2-VL2-VL1-CH1-CL-Fc; VL1-VL2-VH2-VH1-CL-CH1-Fc; VH1-VH2-VL2-VL1-CL-CH1-Fc; VL1-L1-VL2-L2-VH2-L3-VH1-L4-CH1-Fc; VH1-L1-VH2-L2-VL2-L3-VL1-L4-CH1-Fc; VL1-L1-VL2-L2-VH2-L3-VH1-L4-CL-Fc; VH1-L1-VH2-L2-VL2-L3-VL1-L4-CL-Fc; VL1-L1-VL2-L2-VH2-L3-VH1-L4-CH1-L5-CL-Fc; VH1-L1-VH2-L2-VL2-L3-VL1-L4-CH1-L5-CL-Fc; VL1-L1-VL2-L2-VH2-L3-VH1-L4-CL-L5-CH1-Fc; VH1-L1-VH2-L2-VL2-L3-VL1-L4-CL-L5-CH1-Fc; VL1-L1-VL2-L2-VH2-L3-VH1-L4-CH1-L5-Fc; VH1-L1-VH2-L2-VL2-L3-VL1-L4-CH1-L5-Fc; VL1-L1-VL2-L2-VH2-L3-VH1-L4-CL-L5-Fc; VH1-L1-VH2-L2-VL2-L3-VL1-L4-CL-L5-Fc; VL1-L1-VL2-L2-VH2-L3-VH1-L4-CH1-L5-CL-L6-Fc; VH1-L1-VH2-L2-VL2-L3-VL1-L4-CH1-L5-CL-L6-Fc; VL1-L1-VL2-L2-VH2-L3-VH1-L4-CL-L5-CH1-L6-Fc; or VH1-L1-VH2-L2-VL2-L3-VL1-L4-CL-L5-CH1-L6-Fc. In some aspects, the first polypeptide has a structure represented by VL1-L1-VL2-L2-VH2-L3-VH1-L4-CL-L5-CH1-L6-Fc and the second polypeptide has a structure represented by VL1-VL2-VH2-VH1; VH1-VH2-VL2-VL1; VL1-L1-VL2-L2-VH2-L3-VH1; VH1-L1-VH2-L2-VL2-L3-VL1; VL1-VL2-VH2-VH1-Fc; VH1-VH2-VL2-VL1-Fc; VL1-L1-VL2-L2-VH2-L3-VH1-Fc; VH1-L1-VH2-L2-VL2-L3-VL1-Fc; VL1-L1-VL2-L2-VH2-L3-VH1-L4-Fc; VH1-L1-VH2-L2-VL2-L3-VL1-L4-Fc; VL1-VL2-VH2-VH1-CH1; VH1-VH2-VL2-VL1-CH1; VL1-VL2-VH2-VH1-CL; VH1-VH2-VL2-VL1-CL; VL1-VL2-VH2-VH1-CH1-CL; VH1-VH2-VL2-VL1-CH1-CL; VL1-VL2-VH2-VH1-CL-CH1; VH1-VH2-VL2-VL1-CL-CH1; VL1-L1-VL2-L2-VH2-L3-VH1-L4-CH1; VH1-L1-VH2-L2-VL2-L3-VL1-L4-CH1; VL1-L1-VL2-L2-VH2-L3-VH1-L4-CL; VH1-L1-VH2-L2-VL2-L3-VL1-L4-CL; VL1-L1-VL2-L2-VH2-L3-VH1- L4-CH1-L5-CL; VH1-L1-VH2-L2-VL2-L3-VL1-L4-CH1-L5-CL; VL1-L1-VL2-L2-VH2-L3-VH1-L4-CL-L5-CH1; VH1-L1-VH2-L2-VL2-L3-VL1-L4-CL-L5-CH1; VL1-VL2-VH2-VH1-CH1-Fc; VH1-VH2-VL2-VL1-CH1-Fc; VL1-VL2-VH2-VH1-CL-Fc; VH1-VH2-VL2-VL1-CL-Fc; VL1-VL2-VH2-VH1-CH1-CL-Fc; VH1-VH2-VL2-VL1-CH1-CL-Fc; VL1-VL2-VH2-VH1-CL-CH1-Fc; VH1-VH2-VL2-VL1-CL-CH1-Fc; VL1-L1-VL2-L2-VH2-L3-VH1-L4-CH1-Fc; VH1-L1-VH2-L2-VL2-L3-VL1-L4-CH1-Fc; VL1-L1-VL2-L2-VH2-L3-VH1-L4-CL-Fc; VH1-L1-VH2-L2-VL2-L3-VL1-L4-CL-Fc; VL1-L1-VL2-L2-VH2-L3-VH1-L4-CH1-L5-CL-Fc; VH1-L1-VH2-L2-VL2-L3-VL1-L4-CH1-L5-CL- Fc; VL1-L1-VL2-L2-VH2-L3-VH1-L4-CL-L5-CH1-Fc; VH1-L1-VH2-L2-VL2-L3-VL1-L4-CL-L5-CH1-Fc; VL1-L1-VL2-L2-VH2-L3-VH1-L4-CH1-L5-Fc; VH1-L1-VH2-L2-VL2-L3-VL1-L4-CH1-L5-Fc; VL1-L1-VL2-L2-VH2- L3-VH1-L4-CL-L5-Fc; VH1-L1-VH2-L2-VL2-L3-VL1-L4-CL-L5-Fc; VL1-L1-VL2-L2-VH2-L3-VH1-L4-CH1-L5-CL-L6-Fc; VH1-L1-VH2-L2-VL2-L3-VL1-L4-CH1-L5-CL-L6-Fc; VL1-L1-VL2-L2-VH2-L3-VH1-L4-CL-L5-CH1-L6- Fc; or VH1-L1-VH2-L2-VL2-L3-VL1-L4-CL-L5-CH1-L6-Fc. In some aspects, the first polypeptide has a structure represented by VH1-L1-VH2-L2-VL2-L3-VL1-L4-CL-L5-CH1-L6-Fc and the second polypeptide has a structure represented by VL1-VL2-VH2-VH1; VH1-VH2-VL2-VL1; VL1-L1-VL2-L2-VH2-L3-VH1; VH1-L1-VH2-L2-VL2-L3-VL1; VL1-VL2-VH2-VH1-Fc; VH1-VH2-VL2-VL1-Fc; VL1-L1-VL2-L2-VH2-L3-VH1-Fc; VH1-L1-VH2-L2-VL2-L3-VL1-Fc; VL1-L1-VL2-L2-VH2-L3-VH1-L4-Fc; VH1-L1-VH2-L2-VL2-L3-VL1-L4-Fc; VL1-VL2-VH2-VH1-CH1; VH1-VH2-VL2-VL1-CH1; VL1-VL2-VH2-VH1-CL; VH1-VH2-VL2-VL1-CL; VL1-VL2-VH2-VH1-CH1-CL; VH1-VH2-VL2-VL1-CH1-CL; VL1-VL2-VH2-VH1-CL-CH1; VH1-VH2-VL2-VL1-CL-CH1; VL1-L1-VL2-L2-VH2-L3-VH1-L4-CH1; VH1-L1-VH2-L2-VL2-L3-VL1-L4-CH1; VL1-L1-VL2-L2-VH2-L3-VH1-L4-CL; VH1-L1- VH2-L2-VL2-L3-VL1-L4-CL; VL1-L1-VL2-L2-VH2-L3-VH1-L4-CH1-L5-CL; VH1-L1-VH2-L2-VL2-L3-VL1-L4-CH1- L5-CL; VL1-L1-VL2-L2-VH2-L3-VH1-L4-CL-L5-CH1; VH1-L1-VH2-L2-VL2-L3-VL1-L4-CL-L5-CH1; VL1-VL2-VH2-VH1-CH1-Fc; VH1-VH2-VL2-VL1-CH1-Fc; VL1-VL2-VH2-VH1-CL-Fc; VH1-VH2-VL2-VL1-CL-Fc; VL1-VL2-VH2-VH1-CH1-CL-Fc; VH1-VH2-VL2-VL1-CH1-CL-Fc; VL1-VL2-VH2-VH1-CL-CH1-Fc; VH1-VH2-VL2-VL1-CL-CH1-Fe; VL1-L1-VL2-L2-VH2-L3-VH1-L4-CH1-Fc; VH1-L1-VH2-L2-VL2-L3-VL1-L4-CH1-Fc; VL1-L1-VL2-L2-VH2-L3-VH1-L4-CL-Fe; VH1-L1-VH2-L2-VL2-L3-VL1-L4-CL-Fc; VL1-L1-VL2-L2-VH2-L3-VH1-L4-CH1-L5-CL-Fe; VH1-L1-VH2-L2-VL2-L3-VL1-L4-CH1-L5-CL-Fe; VL1-L1-VL2-L2-VH2-L3-VH1-L4-CL-L5-CH1-Fc; VH1-L1-VH2-L2-VL2-L3-VL1-L4-CL-L5-CH1-Fc; VL1-L1-VL2-L2-VH2-L3-VH1-L4-CH1-L5-Fe; VH1-L1-VH2-L2-VL2-L3-VL1-L4-CH1-L5-Fc; VL1-L1-VL2-L2-VH2-L3-VH1-L4-CL-L5-Fe; VH1-L1-VH2-L2-VL2-L3-VL1-L4-CL-L5-Fe; VL1-L1-VL2-L2-VH2-L3-VH1-L4-CH1-L5-CL-L6-Fe; VH1-L1-VH2-L2-VL2-L3-VL1-L4-CH1-L5-CL-L6-Fc; VL1-L1-VL2-L2-VH2-L3-VH1-L4-CL-L5-CH1-L6-Fc; or VH1-L1-VH2-L2-VL2-L3-VL1-L4-CL-L5-CH1-L6-Fc.

[0286] In other aspects, the invention is directed to an antigen binding polypeptide or antigen binding polypeptide complex comprising a polypeptide having a structure represented by VL1-VL2-VH2-VH1 or VH1-VH2-VL2-VL1 which has two Fc regions. In some aspects, one or both Fc regions comprise an amino acid sequence of any one of SEQ ID NOs:391-404 or an amino acid sequence having at least 80%, at least 85%, at least 90%, at least 95%, at least 96%, at least 97%, at least 98% or at least 99% identity to any one of SEQ ID NOs:391-404. In some aspects, an antigen binding polypeptide or antigen binding polypeptide complex comprises a polypeptide having a structure represented by VL1-VL2-VH2-VH1-Fc-Fc; VH1-VH2-VL2-VL1-Fc-F c; VL1-L1-VL2-L2-VH2-L3-VH1-Fc-Fc; VH1-L1-VH2-L2-VL2-L3-VL1-Fc-Fc; VL1-L1-VL2-L2-VH2-L3-VH1-L4-Fc-Fc; VH1-L1-VH2-L2-VL2-L3-VL1-L4-Fc- Fc; VL1-L1-VL2-L2-VH2-L3-VH1-L4-Fc-L5-Fe; or VH1-L1-VH2-L2-VL2-L3-VL1-L4-Fe-L5-Fe; wherein VL1 is a first immunoglobulin light chain variable region that specifically binds to an HIV protein; VL2 is a second immunoglobulin light chain variable region that specifically binds to an HIV protein; VH1 is a first immunoglobulin heavy chain variable region that specifically binds to an HIV protein; VH2 is a second immunoglobulin heavy chain variable region that specifically binds to an HIV protein; Fc is a region comprising an immunoglobulin heavy chain constant region 2 (CH2), an immunoglobulin heavy chain constant region 3 (CH3), and optionally, an immunoglobulin hinge; and L1, L2, L3, L4 and L5 are amino acid linkers.

[0287] In other aspects, the invention is directed to an antigen binding polypeptide or antigen binding polypeptide complex comprising a polypeptide having a structure represented by VL1-VL2-VH2-VH1 or VH1-VH2-VL2-VL1 which has one or two CH3 regions. In some aspects, one or both CH3 regions comprise an amino acid sequence of any one of SEQ ID NOs:416-419 or an amino acid sequence having at least 80%, at least 85%, at least 90%, at least 95%, at least 96%, at least 97%, at least 98% or at least 99% identity to any one of SEQ ID NOs:416-419. In some aspects, the antigen binding polypeptide or antigen binding polypeptide complex comprises a polypeptide having a structure represented by VL1-VL2-VH2-VH1-CH3; VH1-VH2-VL2-VL1-CH3; VL1-L1-VL2-L2-VH2-L3-VH1-CH3; VH1-L1-VH2-L2-VL2-L3-VL1-CH3; VL1-L1-VL2-L2-VH2-L3-VH1-L4-CH3; VH1-L1-VH2-L2-VL2-L3-VL1-L4-CH3; VL1-VL2-VH2-VH1-CH3-CH3; VH1-VH2-VL2-VL1-CH3-CH3; VL1-L1-VL2-L2-VH2-L3-VH1-CH3-CH3; VH1-L1-VH2-L2-VL2-L3-VL1-CH3-CH3; VL1-L1-VL2-L2-VH2-L3-VH1-L4-CH3-CH3; VH1-L1-VH2-L2-VL2-L3-VL1-L4-CH3-CH3; VL1-L1-VL2-L2-VH2-L3-VH1-L4-CH3-L5-CH3; or VH1-L1-VH2-L2-VL2-L3-VL1-L4- CH3-L5-CH3; wherein VL1 is a first immunoglobulin light chain variable region that specifically binds to an HIV protein; VL2 is a second immunoglobulin light chain variable region that specifically binds to an HIV protein; VH1 is a first immunoglobulin heavy chain variable region that specifically binds to an HIV protein; VH2 is a second immunoglobulin heavy chain variable region that specifically binds to an HIV protein; CH3 is an immunoglobulin heavy chain constant region 3; and L1, L2, L3, L4 and L5 are amino acid linkers.

[0288] In some aspects of an antigen binding polypeptide or antigen binding polypeptide complex of the invention, VH1 and VH2 each comprise a heavy chain variable region from the PGT121, VRC01, 10E8v4 or PG16 antibody or a variant thereof. In another aspect, VL1 and VL2 each comprise a light chain variable region from the PGT121, VRC01, 10E8v4 or PG16 antibody or a variant thereof. In some aspects, VH1 and VH2 each comprise a heavy chain variable region from the PGT121, VRC01, 10E8v4 or PG16 antibody or a variant thereof, and VL1 and VL2 each comprise a light chain variable region from the PGT121, VRC01, 10E8v4 or PG16 antibody or a variant thereof.

[0289] In some aspects, antigen binding polypeptides or antigen binding polypeptide complexes comprise VH and VL sequences from broadly neutralizing antibodies that target CD4bs inclusive of VRC01, VRC03, 3BNC117, N6, N49P7, 3BNC60, VRC-PG04, VRC-PG20, NIH45-46, VRC-CH31, 12A12, CH103, 8ANC131, VRC13 and VRC16.

[0290] In some aspects, VH1 and VH2 of an antigen binding polypeptide or antigen binding polypeptide complex of the invention each comprise an amino acid sequence having at least 90% identity, at least 95% identity or 100% identity to any one of SEQ ID NOs:20-23. For example, the VH1 and VH2 of an antigen binding polypeptide or antigen binding polypeptide complex may each comprise an amino acid sequence having at least 90% identity (such as at least 91%, 92%, 93%, 94%, 95%, 96%, 97%, 98% or 99% identity) to any one of SEQ ID NOs:20-23. For example, the VH1 and VH2 of an antigen binding polypeptide or antigen binding polypeptide complex may each comprise the amino acid sequence of any one of SEQ ID NOs:20-23. In some aspects, VL1 and VL2 each comprise an amino acid sequence having at least 90% identity, at least 95% identity or 100% identity to any one of SEQ ID NOs:24-27. For example, the VL1 and VL2 of an antigen binding polypeptide or antigen binding polypeptide complex may each comprise an amino acid sequence having at least 90% identity (such as at least 91%, 92%, 93%, 94%, 95%, 96%, 97%, 98% or 99% identity) to any one of SEQ ID NOs: 24-27. For example, the VL1 and VL2 of an antigen binding polypeptide or antigen binding polypeptide complex may each comprise the amino acid sequence of any one of SEQ ID NOs: 24-27. In some aspects, VH1 and VH2 of an antigen binding polypeptide or antigen binding polypeptide complex of the invention each comprise an amino acid sequence having at least 90% identity, at least 95% identity or 100% identity to any one of SEQ ID NOs:20-23, and VL1 and VL2 each comprise an amino acid sequence having at least 90% identity, at least 95% identity or 100% identity to any one of SEQ ID NOs:24-27. For example, the VH1 and VH2 of an antigen binding polypeptide or antigen binding polypeptide complex of the invention may each comprise an amino acid sequence having at least 90% identity (such as at least 91%, 92%, 93%, 94%, 95%, 96%, 97%, 98% or 99% identity) to any one of SEQ ID NOs:20-23, and VL1 and VL2 each comprise an amino acid sequence having at least 90% identity (such as at least 91%, 92%, 93%, 94%, 95%, 96%, 97%, 98% or 99% identity) to any one of SEQ ID NOs:24-27.

[0291] In some aspects, VH1 and VH2 of an antigen binding polypeptide or antigen binding polypeptide complex of the invention each comprise a CDR1 having an amino acid sequence with at least 90% identity, at least 95% identity or 100% identity to any one of SEQ ID NOs:60, 63, 66 and 69; a CDR2 having an amino acid sequence with at least 90% identity, at least 95% identity or 100% identity to any one of SEQ ID NOs:61, 64, 67 and 70; and a CDR3 having an amino acid sequence with at least 90% identity, at least 95% identity or 100% identity to any one of SEQ ID NOs:62, 65, 68 and 71; and/or VL1 and VL2 each comprise a CDR1 having an amino acid sequence with at least 90% identity, at least 95% identity or 100% identity to any one of SEQ ID NOs:72, 75, 78 and 81; a CDR2 having an amino acid sequence with at least 90% identity, at least 95% identity or 100% identity to any one of SEQ ID NOs:73, 76, 79 and 82; and a CDR3 having an amino acid sequence with at least 90% identity, at least 95% identity or 100% identity to any one of SEQ ID NOs:74, 77, 80 and 83. For example, the VH1 and VH2 of an antigen binding polypeptide or antigen binding polypeptide complex may each comprise a CDR1 having an amino acid sequence with at least 90% identity (such as at least 91%, 92%, 93%, 94%, 95%, 96%, 97%, 98% or 99% identity) to any one of SEQ ID NOs:60, 63, 66 and 69; a CDR2 having an amino acid sequence with at least 90% identity (such as at least 91%, 92%, 93%, 94%, 95%, 96%, 97%, 98% or 99% identity) to any one of SEQ ID NOs:61, 64, 67 and 70; and a CDR3 having an amino acid sequence with at least 90% identity (such as at least 91%, 92%, 93%, 94%, 95%, 96%, 97%, 98% or 99% identity) to any one of SEQ ID NOs:62, 65, 68 and 71; and/or the VL1 and VL2 may each comprise a CDR1 having an amino acid sequence with at least 90% identity (such as at least 91%, 92%, 93%, 94%, 95%, 96%, 97%, 98% or 99% identity) to any one of SEQ ID NOs:72, 75, 78 and 81; a CDR2 having an amino acid sequence with at least 90% identity (such as at least 91%, 92%, 93%, 94%, 95%, 96%, 97%, 98% or 99% identity) to any one of SEQ ID NOs:73, 76, 79 and 82; and a CDR3 having an amino acid sequence with at least 90% identity (such as at least 91%, 92%, 93%, 94%, 95%, 96%, 97%, 98% or 99% identity) to any one of SEQ ID NOs:74, 77, 80 and 83. For example, the VH1 and VH2 of an antigen binding polypeptide or antigen binding polypeptide complex may each comprise a CDR1 having the amino acid sequence of any one of SEQ ID NOs:60, 63, 66 and 69; a CDR2 having the amino acid sequence of any one of SEQ ID NOs:61, 64, 67 and 70; and a CDR3 having the amino acid sequence of any one of SEQ ID NOs:62, 65, 68 and 71; and/or the VL1 and VL2 may each comprise a CDR1 having the amino acid sequence of any one of SEQ ID NOs:72, 75, 78 and 81; a CDR2 having the amino acid sequence of any one of SEQ ID NOs:73, 76, 79 and 82; and a CDR3 having the amino acid sequence of any one of SEQ ID NOs:74, 77, 80 and 83.

[0292] In another example, the VH1 and VH2 of an antigen binding polypeptide or antigen binding polypeptide complex may each comprise a CDR1 having an amino acid sequence with at least 90% identity (such as at least 91%, 92%, 93%, 94%, 95%, 96%, 97%, 98% or 99% identity) to SEQ ID NO:60; a CDR2 having an amino acid sequence with at least 90% identity (such as at least 91%, 92%, 93%, 94%, 95%, 96%, 97%, 98% or 99% identity) to SEQ ID NO:61; and a CDR3 having an amino acid sequence with at least 90% identity (such as at least 91%, 92%, 93%, 94%, 95%, 96%, 97%, 98% or 99% identity) to SEQ ID NO:62; and the VL1 and VL2 may each comprise a CDR1 having an amino acid sequence with at least 90% identity (such as at least 91%, 92%, 93%, 94%, 95%, 96%, 97%, 98% or 99% identity) to SEQ ID NO:72; a CDR2 having an amino acid sequence with at least 90% identity (such as at least 91%, 92%, 93%, 94%, 95%, 96%, 97%, 98% or 99% identity) to SEQ ID NO:73; and a CDR3 having an amino acid sequence with at least 90% identity (such as at least 91%, 92%, 93%, 94%, 95%, 96%, 97%, 98% or 99% identity) to SEQ ID NO:74. For example, the VH1 and VH2 of an antigen binding polypeptide or antigen binding polypeptide complex may each comprise a CDR1 having the amino acid sequence of SEQ ID NO:60; a CDR2 having the amino acid sequence of any one of SEQ ID NO:61; and a CDR3 having the amino acid sequence of SEQ ID NO:62; and the VL1 and VL2 may each comprise a CDR1 having the amino acid sequence of SEQ ID NO:72; a CDR2 having the amino acid sequence of SEQ ID NO:73; and a CDR3 having the amino acid sequence of SEQ ID NO:74.

[0293] In another example, the VH1 and VH2 of an antigen binding polypeptide or antigen binding polypeptide complex may each comprise a CDR1 having an amino acid sequence with at least 90% identity (such as at least 91%, 92%, 93%, 94%, 95%, 96%, 97%, 98% or 99% identity) to SEQ ID NO:63; a CDR2 having an amino acid sequence with at least 90% identity (such as at least 91%, 92%, 93%, 94%, 95%, 96%, 97%, 98% or 99% identity) to SEQ ID NO:64; and a CDR3 having an amino acid sequence with at least 90% identity (such as at least 91%, 92%, 93%, 94%, 95%, 96%, 97%, 98% or 99% identity) to SEQ ID NO:65; and the VL1 and VL2 may each comprise a CDR1 having an amino acid sequence with at least 90% identity (such as at least 91%, 92%, 93%, 94%, 95%, 96%, 97%, 98% or 99% identity) to SEQ ID NO:75; a CDR2 having an amino acid sequence with at least 90% identity (such as at least 91%, 92%, 93%, 94%, 95%, 96%, 97%, 98% or 99% identity) to SEQ ID NO:76; and a CDR3 having an amino acid sequence with at least 90% identity (such as at least 91%, 92%, 93%, 94%, 95%, 96%, 97%, 98% or 99% identity) to SEQ ID NO:77. For example, the VH1 and VH2 of an antigen binding polypeptide or antigen binding polypeptide complex may each comprise a CDR1 having the amino acid sequence of SEQ ID NO:63 a CDR2 having the amino acid sequence of any one of SEQ ID NO:64; and a CDR3 having the amino acid sequence of SEQ ID NO:65; and the VL1 and VL2 may each comprise a CDR1 having the amino acid sequence of SEQ ID NO:75; a CDR2 having the amino acid sequence of SEQ ID NO:76; and a CDR3 having the amino acid sequence of SEQ ID NO:77.

[0294] In another example, the VH1 and VH2 of an antigen binding polypeptide or antigen binding polypeptide complex may each comprise a CDR1 having an amino acid sequence with at least 90% identity (such as at least 91%, 92%, 93%, 94%, 95%, 96%, 97%, 98% or 99% identity) to SEQ ID NO:66; a CDR2 having an amino acid sequence with at least 90% identity (such as at least 91%, 92%, 93%, 94%, 95%, 96%, 97%, 98% or 99% identity) to SEQ ID NO:67; and a CDR3 having an amino acid sequence with at least 90% identity (such as at least 91%, 92%, 93%, 94%, 95%, 96%, 97%, 98% or 99% identity) to SEQ ID NO:68; and the VL1 and VL2 may each comprise a CDR1 having an amino acid sequence with at least 90% identity (such as at least 91%, 92%, 93%, 94%, 95%, 96%, 97%, 98% or 99% identity) to SEQ ID NO:78; a CDR2 having an amino acid sequence with at least 90% identity (such as at least 91%, 92%, 93%, 94%, 95%, 96%, 97%, 98% or 99% identity) to SEQ ID NO:79; and a CDR3 having an amino acid sequence with at least 90% identity (such as at least 91%, 92%, 93%, 94%, 95%, 96%, 97%, 98% or 99% identity) to SEQ ID NO:80. For example, the VH1 and VH2 of an antigen binding polypeptide or antigen binding polypeptide complex may each comprise a CDR1 having the amino acid sequence of SEQ ID NO:66; a CDR2 having the amino acid sequence of any one of SEQ ID NO:67; and a CDR3 having the amino acid sequence of SEQ ID NO:68; and the VL1 and VL2 may each comprise a CDR1 having the amino acid sequence of SEQ ID NO:78; a CDR2 having the amino acid sequence of SEQ ID NO:79; and a CDR3 having the amino acid sequence of SEQ ID NO:80.

[0295] In another example, the VH1 and VH2 of an antigen binding polypeptide or antigen binding polypeptide complex may each comprise a CDR1 having an amino acid sequence with at least 90% identity (such as at least 91%, 92%, 93%, 94%, 95%, 96%, 97%, 98% or 99% identity) to SEQ ID NO:69; a CDR2 having an amino acid sequence with at least 90% identity (such as at least 91%, 92%, 93%, 94%, 95%, 96%, 97%, 98% or 99% identity) to SEQ ID NO:70; and a CDR3 having an amino acid sequence with at least 90% identity (such as at least 91%, 92%, 93%, 94%, 95%, 96%, 97%, 98% or 99% identity) to SEQ ID NO:71; and the VL1 and VL2 may each comprise a CDR1 having an amino acid sequence with at least 90% identity (such as at least 91%, 92%, 93%, 94%, 95%, 96%, 97%, 98% or 99% identity) to SEQ ID NO:81; a CDR2 having an amino acid sequence with at least 90% identity (such as at least 91%, 92%, 93%, 94%, 95%, 96%, 97%, 98% or 99% identity) to SEQ ID NO:82; and a CDR3 having an amino acid sequence with at least 90% identity (such as at least 91%, 92%, 93%, 94%, 95%, 96%, 97%, 98% or 99% identity) to SEQ ID NO:83. For example, the VH1 and VH2 of an antigen binding polypeptide or antigen binding polypeptide complex may each comprise a CDR1 having the amino acid sequence of SEQ ID NO:69; a CDR2 having the amino acid sequence of any one of SEQ ID NO:70; and a CDR3 having the amino acid sequence of SEQ ID NO:71; and the VL1 and VL2 may each comprise a CDR1 having the amino acid sequence of SEQ ID NO:81; a CDR2 having the amino acid sequence of SEQ ID NO:82; and a CDR3 having the amino acid sequence of SEQ ID NO:83.

[0296] In yet other aspects, the invention is directed to antigen binding polypeptide complexes having a first polypeptide and a second polypeptide, wherein the first polypeptide has a structure represented by VL1-VL2-VH2-VH1 or VH1-VH2-VL2-VL1, and the second polypeptide has a structure represented by VL3-VL4-VH4-VH3 or VH3-VH4-VL4-VL3, wherein the antigen binding polypeptide complexes specifically bind to an HIV protein. In some aspects, the first polypeptide has a structure represented by VL1-VL2-VH2-VH1 and the second polypeptide has a structure represented by VL3-VL4-VH4-VH3. In some aspects, the first polypeptide has a structure represented by VL1-VL2-VH2-VH1 and the second polypeptide has a structure represented by VH3-VH4-VL4-VL3. In some aspects, the first polypeptide has a structure represented by VH1-VH2-VL2-VL1 and the second polypeptide has a structure represented by VL3-VL4-VH4-VH3. In some aspects, the first polypeptide has a structure represented by VH1-VH2-VL2-VL1 and the second polypeptide has a structure represented by VH3-VH4-VL4-VL3. In some aspects, the antigen binding polypeptide complex contains an amino acid linker between any two regions denoted in a structure described herein. In some aspects, the antigen binding polypeptide complex can contain an Fc region, CH1 region, CL region, CH3 region or any combination thereof. In some aspects, the Fc region, CH1 region, CL region and/or CH3 is located at the carboxy terminus of the first polypeptide and/or second polypeptide, and is optionally linked to polypeptide by at least one amino acid linker. In some aspects, the Fc region, CH1 region, CL region and/or CH3 is located at the carboxy terminus of the first polypeptide, and is optionally linked to polypeptide by at least one amino acid linker. In some aspects, the Fc region, CH1 region, CL region and/or CH3 is located at the carboxy terminus of the second polypeptide, and is optionally linked to polypeptide by at least one amino acid linker. In some aspects, the Fc region, CH1 region, CL region and/or CH3 is located at the carboxy terminus of the first polypeptide and second polypeptide, and is optionally linked to polypeptide by at least one amino acid linker. In some aspects, the Fc region comprises an amino acid sequence of any one of SEQ ID NOs:391-404 or an amino acid sequence having at least 80%, at least 85%, at least 90%, at least 95%, at least 96%, at least 97%, at least 98%, or at least 99% identity to any one of SEQ ID NOs:391-404. In some aspects, the CH1 region comprises an amino acid sequence of any one of SEQ ID NOs:405-409 or an amino acid sequence having at least 80%, at least 85%, at least 90%, at least 95%, at least 96%, at least 97%, at least 98%, or at least 99% identity to any one of SEQ ID NOs:405-409. In some aspects, the CL region comprises an amino acid sequence of SEQ ID NO:420 or 421 or an amino acid sequence having at least 80%, at least 85%, at least 90%, at least 95%, at least 96%, at least 97%, at least 98% or at least 99% identity to SEQ ID NO:420 or 421. In some aspects, the antigen binding polypeptide complex is an antibody or antigen binding fragment thereof.

[0297] Specific binding to an HIV protein includes, but is not limited to, specific binding to one or more HIV proteins and specific binding to one or more epitopes on the same HIV protein. In some aspects, the HIV protein is selected from the group consisting of an HIV envelope protein, an HIV structural protein, an HIV functional protein, or an HIV accessory protein. In some aspects, the HIV envelope protein is HIV envelope glycoprotein (Env), HIV envelope glycoprotein gp160, HIV envelope surface glycoprotein gp120, or HIV transmembrane envelope protein gp41. In some aspects, the HIV structural protein is p17, p24, p7 or p55. In some aspects, the HIV functional protein is p66, HIV-1 protease (PR) or p31. In some aspects, the HIV accessory protein is Nef, Tat, Rev, Vif, Vpr or Vpu.

[0298] In some aspects, the invention is directed to an antigen binding polypeptide complex comprising a first polypeptide and a second polypeptide; wherein the first polypeptide has a structure represented by VL1-VL2-VH2-VH1; VH1-VH2-VL2-VL1; VL1-L1-VL2-L2-VH2-L3-VH1; or VH1-L1-VH2-L2-VL2-L3-VL1; wherein the second polypeptide has a structure represented by VL3-VL4-VH4-VH3; VH3-VH4-VL4-VL3; VL3-L4-VL4-L5-VH4-L6-VH3; or VH3-L4-VH4-L5-VL4-L6-VL3; wherein VL1 is a first immunoglobulin light chain variable region that specifically binds to an HIV protein; VL2 is a second immunoglobulin light chain variable region that specifically binds to an HIV protein; VL3 is a third immunoglobulin light chain variable region that specifically binds to an HIV protein; VL4 is a fourth immunoglobulin light chain variable region that specifically binds to an HIV protein; VH1 is a first immunoglobulin heavy chain variable region that specifically binds to an HIV protein; VH2 is a second immunoglobulin heavy chain variable region that specifically binds to an HIV protein; VH3 is a third immunoglobulin heavy chain variable region that specifically binds to an HIV protein; VH4 is a fourth immunoglobulin heavy chain variable region that specifically binds to an HIV protein; and L1, L2, L3, L4, L5 and L6 are amino acid linkers. In some aspects, the first polypeptide has a structure represented by VL1-VL2-VH2-VH1, and the second polypeptide has a structure represented by VL3-VL4-VH4-VH3; VH3-VH4-VL4-VL3; VL3-L4-VL4-L5-VH4-L6-VH3; or VH3-L4-VH4-L5-VL4-L6-VL3. In some aspects, the first polypeptide has a structure represented by VH1-VH2-VL2-VL1, and the second polypeptide has a structure represented by VL3-VL4-VH4-VH3; VH3-VH4-VL4-VL3; VL3-L4-VL4-L5-VH4-L6-VH3; or VH3-L4-VH4-L5-VL4-L6-VL3. In some aspects, the first polypeptide has a structure represented by VL1-L1-VL2-L2-VH2-L3-VH1, and the second polypeptide has a structure represented by VL3-VL4-VH4-VH3; VH3-VH4-VL4-VL3; VL3-L4-VL4-L5-VH4-L6-VH3; or VH3-L4-VH4-L5-VL4-L6-VL3. In some aspects, the first polypeptide has a structure represented by VH1-L1-VH2-L2-VL2-L3-VL1, and the second polypeptide has a structure represented by VL3-VL4-VH4-VH3; VH3-VH4-VL4-VL3; VL3-L4-VL4-L5-VH4-L6-VH3; or VH3-L4-VH4-L5-VL4-L6-VL3.

[0299] In other aspects, the invention is directed to an antigen binding polypeptide complex comprising a first polypeptide and a second polypeptide; wherein the first polypeptide has a structure represented by VL1-VL2-VH2-VH1-Fe; VH1-VH2-VL2-VL1-Fc; VL1-L1-VL2-L2-VH2-L3-VH1-Fc; VH1-L1-VH2-L2-VL2-L3-VL1-Fc; VL1-L1-VL2-L2-VH2-L3-VH1-L4-Fc; or VH1-L1-VH2-L2-VL2-L3-VL1-L4-Fc; wherein the second polypeptide has a structure represented by VL3-VL4-VH4-VH3-Fe; VH3-VH4-VL4-VL3-Fc; VL3-L5-VL4-L6-VH4-L7-VH3-Fc; VH3-L5-VH4-L6-VL4-L7-VL3-Fc; VL3-L5-VL4-L6-VH4-L7-VH3-L8-Fc; or VH3-L5-VH4-L6-VL4-L7-VL3-L8-Fc; wherein VL1 is a first immunoglobulin light chain variable region that specifically binds to an HIV protein; VL2 is a second immunoglobulin light chain variable region that specifically binds to an HIV protein; VL3 is a third immunoglobulin light chain variable region that specifically binds to an HIV protein; VL4 is a fourth immunoglobulin light chain variable region that specifically binds to an HIV protein; VH1 is a first immunoglobulin heavy chain variable region that specifically binds to an HIV protein; VH2 is a second immunoglobulin heavy chain variable region that specifically binds to an HIV protein; VH3 is a third immunoglobulin heavy chain variable region that specifically binds to an HIV protein; VH4 is a fourth immunoglobulin heavy chain variable region that specifically binds to an HIV protein; Fc is a region comprising an immunoglobulin heavy chain constant region 2 (CH2), an immunoglobulin heavy chain constant region 3 (CH3), and optionally, an immunoglobulin hinge; and L1, L2, L3, L4, L5, L6, L7 and L8 are amino acid linkers. In some aspects, the first polypeptide has a structure represented by VL1-VL2-VH2-VH1-Fc and the second polypeptide has a structure represented by VL3-VL4-VH4-VH3-Fc; VH3-VH4-VL4-VL3-Fc; VL3-L5-VL4-L6-VH4-L7-VH3-Fc; VH3-L5-VH4-L6-VL4-L7-VL3-Fc; VL3-L5-VL4-L6-VH4-L7-VH3-L8-Fc; or VH3-L5-VH4-L6-VL4-L7-VL3-L8-Fe. In some aspects, the first polypeptide has a structure represented by VH1-VH2-VL2-VL1-Fc and the second polypeptide has a structure represented by VL3-VL4-VH4-VH3-Fc; VH3-VH4-VL4-VL3-Fc; VL3-L5-VL4-L6-VH4-L7-VH3-Fc; VH3-L5-VH4-L6-VL4-L7-VL3-Fc; VL3-L5-VL4-L6-VH4-L7-VH3-L8-Fc; or VH3-L5-VH4-L6-VL4-L7-VL3-L8-Fc. In some aspects, the first polypeptide has a structure represented by VL1-L1-VL2-L2-VH2-L3-VH1-Fe and the second polypeptide has a structure represented by VL3-VL4-VH4-VH3-Fc; VH3-VH4-VL4-VL3-Fc; VL3-L5-VL4-L6-VH4-L7-VH3-Fc; VH3-L5-VH4-L6-VL4-L7-VL3-Fc; VL3-L5-VL4-L6-VH4-L7-VH3-L8-Fc; or VH3-L5-VH4-L6-VL4-L7-VL3-L8-Fe. In some aspects, the first polypeptide has a structure represented by VH1-L1-VH2-L2-VL2-L3-VL1-Fc and the second polypeptide has a structure represented by VL3-VL4-VH4-VH3-Fc; VH3-VH4-VL4-VL3-Fc; VL3-L5-VL4-L6-VH4-L7-VH3-Fc; VH3-L5-VH4-L6-VL4-L7-VL3-Fc; VL3-L5-VL4-L6-VH4-L7-VH3-L8-Fc; or VH3-L5-VH4-L6-VL4-L7-VL3-L8-Fc. In some aspects, the first polypeptide has a structure represented by VL1-L1-VL2-L2-VH2-L3-VH1-L4-Fc and the second polypeptide has a structure represented by VL3-VL4-VH4-VH3-Fc; VH3-VH4-VL4-VL3-Fe; VL3-L5-VL4-L6-VH4-L7-VH3-Fc; VH3-L5-VH4-L6-VL4-L7-VL3-Fc; VL3-L5-VL4-L6-VH4-L7-VH3-L8-Fc; or VH3-L5-VH4-L6-VL4-L7-VL3-L8-Fc. In some aspects, the first polypeptide has a structure represented by VH1-L1-VH2-L2-VL2-L3-VL1-L4-Fc and the second polypeptide has a structure represented by VL3-VL4-VH4-VH3-Fc; VH3-VH4-VL4-VL3-Fc; VL3-L5-VL4-L6-VH4-L7-VH3-Fc; VH3-L5-VH4-L6-VL4-L7-VL3-Fc; VL3-L5-VL4-L6-VH4-L7-VH3-L8-Fc; or VH3-L5-VH4-L6-VL4-L7-VL3-L8-Fe.

[0300] In other aspects, the invention is directed to an antigen binding polypeptide complex comprising a first polypeptide and a second polypeptide; wherein the first polypeptide has a structure represented by VL1-VL2-VH2-VH1-CH1; VH1-VH2-VL2-VL1-CH1; VL1-VL2-VH2-VH1-CL; VH1-VH2-VL2-VL1-CL; VL1-VL2-VH2-VH1-CH1-CL; VH1-VH2-VL2-VL1-CH1-CL; VL1-VL2-VH2-VH1-CL-CH1; VH1-VH2-VL2-VL1-CL-CH1; VL1-L1-VL2-L2-VH2-L3-VH1-L4-CH1; VH1-L1-VH2-L2-VL2-L3-VL1-L4-CH1; VL1-L1-VL2-L2-VH2-L3-VH1-L4-CL; VH1-L1- VH2-L2-VL2-L3-VL1-L4-CL; VL1-L1-VL2-L2-VH2-L3-VH1-L4-CH1-L5-CL; VH1-L1-VH2-L2-VL2-L3-VL1-L4-CH1- L5-CL; VL1-L1-VL2-L2-VH2-L3-VH1-L4-CL-L5-CH1; or VH1-L1-VH2-L2-VL2-L3-VL1-L4-CL-L5-CH1; wherein the second polypeptide has a structure represented by VL3-VL4-VH4-VH3-CH1; VH3-VH4-VL4-VL3-CH1; VL3-VL4-VH4-VH3-CL; VH3-VH4-VL4-VL3-CL; VL3-VL4-VH4-VH3-CH1-CL; VH3-VH4-VL4-VL3-CH1-CL; VL3-VL4-VH4-VH3-CL-CH1; VH3-VH4-VL4-VL3-CL-CH1; VL3-L6-VL4-L7-VH4-L8-VH3-L9-CH1; VH3-L6-VH4-L7-VL4-L8-VL3-L9-CH1; VL3-L6-VL4-L7-VH4-L8-VH3-L9-CL; VH3-L6-VH4-L7-VL4-L8-VL3-L9-CL; VL3-L6-VL4- L7-VH4-L8-VH3-L9-CH1-L10-CL; VH3-L6-VH4-L7-VL4-L8-VL3-L9-CH1-L10-CL; VL3-L6-VL4-L7-VH4-L8-VH3-L9-CL-L10-CH1; or VH3-L6-VH4-L7-VL4-L8-VL3-L9-CL-L10-CH1; wherein VL1 is a first immunoglobulin light chain variable region that specifically binds to an HIV protein; VL2 is a second immunoglobulin light chain variable region that specifically binds to an HIV protein; VL3 is a third immunoglobulin light chain variable region that specifically binds to an HIV protein; VL4 is a fourth immunoglobulin light chain variable region that specifically binds to an HIV protein; VH1 is a first immunoglobulin heavy chain variable region that specifically binds to an HIV protein; VH2 is a second immunoglobulin heavy chain variable region that specifically binds to an HIV protein; VH3 is a third immunoglobulin heavy chain variable region that specifically binds to an HIV protein; VH4 is a fourth immunoglobulin heavy chain variable region that specifically binds to an HIV protein; CH1 is an immunoglobulin heavy chain constant region 1; CL is an immunoglobulin light chain constant region; and L1, L2, L3, L4, L5, L6, L7, L8, L9 and L10 are amino acid linkers. In some aspects, the first polypeptide has a structure represented by VL1-VL2-VH2-VH1-CH1 and the second polypeptide has a structure represented by VL3-VL4-VH4-VH3-CH1; VH3-VH4-VL4-VL3-CH1; VL3-VL4-VH4-VH3-CL; VH3-VH4-VL4-VL3-CL; VL3-VL4-VH4-VH3-CH1-CL; VH3-VH4-VL4-VL3-CH1-CL; VL3-VL4-VH4-VH3-CL-CH1; VH3-VH4-VL4-VL3-CL-CH1; VL3-L6-VL4-L7-VH4-L8-VH3-L9-CH1; VH3-L6-VH4-L7-VL4-L8-VL3-L9-CH1; VL3-L6-VL4-L7-VH4-L8-VH3-L9-CL; VH3-L6-VH4-L7-VL4-L8-VL3-L9-CL; VL3-L6-VL4- L7-VH4-L8-VH3-L9-CH1-L10-CL; VH3-L6-VH4-L7-VL4-L8-VL3-L9-CH1-L10-CL; VL3-L6-VL4-L7-VH4-L8-VH3-L9-CL-L10-CH1; or VH3-L6-VH4-L7-VL4-L8-VL3-L9-CL-L10-CH1. In some aspects, the first polypeptide has a structure represented by VH1-VH2-VL2-VL1-CH1 and the second polypeptide has a structure represented by VL3-VL4-VH4-VH3-CH1; VH3-VH4-VL4-VL3-CH1; VL3-VL4-VH4-VH3-CL; VH3-VH4-VL4-VL3-CL; VL3-VL4-VH4-VH3-CH1-CL; VH3-VH4-VL4-VL3-CH1-CL; VL3-VL4-VH4-VH3-CL-CH1; VH3-VH4-VL4-VL3-CL-CH1; VL3-L6-VL4-L7-VH4-L8-VH3-L9-CH1; VH3-L6-VH4-L7-VL4-L8-VL3-L9-CH1; VL3-L6-VL4-L7-VH4-L8-VH3-L9-CL; VH3-L6-VH4-L7-VL4-L8-VL3-L9-CL; VL3-L6-VL4-L7-VH4-L8-VH3-L9-CH1-L10-CL; VH3-L6-VH4-L7-VL4-L8-VL3- L9-CH1-L10-CL; VL3-L6-VL4-L7-VH4-L8-VH3-L9-CL-L10-CH1; or VH3-L6-VH4-L7-VL4-L8-VL3-L9-CL-L10-CH1. In some aspects, the first polypeptide has a structure represented by VL1-VL2-VH2-VH1-CL and the second polypeptide has a structure represented by VL3-VL4-VH4-VH3-CH1; VH3-VH4-VL4-VL3-CH1; VL3-VL4-VH4-VH3-CL; VH3-VH4-VL4-VL3-CL; VL3-VL4-VH4-VH3-CH1-CL; VH3-VH4-VL4-VL3-CH1-CL; VL3-VL4-VH4-VH3-CL-CH1; VH3-VH4-VL4-VL3-CL-CH1; VL3-L6-VL4-L7-VH4-L8-VH3-L9-CH1; VH3-L6-VH4-L7-VL4-L8-VL3-L9-CH1; VL3-L6-VL4-L7-VH4-L8-VH3-L9-CL; VH3-L6-VH4-L7-VL4-L8-VL3-L9-CL; VL3-L6-VL4-L7-VH4-L8-VH3- L9-CH1-L10-CL; VH3-L6-VH4-L7-VL4-L8-VL3-L9-CH1-L10-CL; VL3-L6-VL4-L7-VH4-L8-VH3-L9-CL-L10-CH1; or VH3-L6-VH4-L7-VL4-L8-VL3-L9-CL-L10-CH1. In some aspects, the first polypeptide has a structure represented by VH1-VH2-VL2-VL1-CL and the second polypeptide has a structure represented by VL3-VL4-VH4-VH3-CH1; VH3-VH4-VL4-VL3-CH1; VL3-VL4-VH4-VH3-CL; VH3-VH4-VL4-VL3-CL; VL3-VL4-VH4-VH3-CH1-CL; VH3-VH4-VL4-VL3-CH1-CL; VL3-VL4-VH4-VH3-CL-CH1; VH3-VH4-VL4-VL3-CL-CH1; VL3-L6-VL4-L7-VH4-L8-VH3-L9-CH1; VH3-L6-VH4-L7-VL4-L8-VL3-L9-CH1; VL3-L6-VL4-L7-VH4-L8-VH3-L9-CL; VH3-L6-VH4-L7- VL4-L8-VL3-L9-CL; VL3-L6-VL4-L7-VH4-L8-VH3-L9-CH1-L10-CL; VH3-L6-VH4-L7-VL4-L8-VL3-L9-CH1-L10-CL; VL3-L6-VL4-L7-VH4-L8-VH3-L9-CL-L10-CH1; or VH3-L6-VH4-L7-VL4-L8-VL3-L9-CL-L10-CH1. In some aspects, the first polypeptide has a structure represented by VL1-VL2-VH2-VH1-CH1-CL and the second polypeptide has a structure represented by VL3-VL4-VH4-VH3-CH1; VH3-VH4-VL4-VL3-CH1; VL3-VL4-VH4-VH3-CL; VH3-VH4-VL4-VL3-CL; VL3-VL4-VH4-VH3-CH1-CL; VH3-VH4-VL4-VL3-CH1-CL; VL3-VL4-VH4-VH3-CL-CH1; VH3-VH4-VL4-VL3-CL-CH1; VL3-L6-VL4-L7-VH4-L8-VH3-L9-CH1; VH3-L6-VH4-L7-VL4-L8-VL3-L9-CH1; VL3-L6-VL4-L7-VH4-L8-VH3-L9-CL; VH3-L6-VH4-L7-VL4-L8-VL3-L9-CL; VL3-L6-VL4-L7-VH4-L8-VH3- L9-CH1-L10-CL; VH3-L6-VH4-L7-VL4-L8-VL3-L9-CH1-L10-CL; VL3-L6-VL4-L7-VH4-L8-VH3-L9-CL-L10-CH1; or VH3-L6-VH4-L7-VL4-L8-VL3-L9-CL-L10-CH1. In some aspects, the first polypeptide has a structure represented by VH1-VH2-VL2-VL1-CH1-CL and the second polypeptide has a structure represented by VL3-VL4-VH4-VH3-CH1; VH3-VH4-VL4-VL3-CH1; VL3-VL4-VH4-VH3-CL; VH3-VH4-VL4-VL3-CL; VL3-VL4-VH4-VH3-CH1-CL; VH3-VH4-VL4-VL3-CH1-CL; VL3-VL4-VH4-VH3-CL-CH1; VH3-VH4-VL4-VL3-CL-CH1; VL3-L6-VL4-L7-VH4-L8-VH3-L9-CH1; VH3-L6-VH4-L7-VL4-L8-VL3-L9-CH1; VL3-L6-VL4-L7-VH4-L8-VH3-L9-CL; VH3-L6-VH4- L7-VL4-L8-VL3-L9-CL; VL3-L6-VL4-L7-VH4-L8-VH3-L9-CH1-L10-CL; VH3-L6-VH4-L7-VL4-L8-VL3-L9-CH1- L10-CL; VL3-L6-VL4-L7-VH4-L8-VH3-L9-CL-L10-CH1; or VH3-L6-VH4-L7-VL4-L8-VL3-L9-CL-L10-CH1. In some aspects, the first polypeptide has a structure represented by VL1-VL2-VH2-VH1-CL-CH1 and the second polypeptide has a structure represented by VL3-VL4-VH4-VH3-CH1; VH3-VH4-VL4-VL3-CH1; VL3-VL4-VH4-VH3-CL; VH3-VH4-VL4-VL3-CL; VL3-VL4-VH4-VH3-CH1-CL; VH3-VH4-VL4-VL3-CH1-CL; VL3-VL4-VH4-VH3-CL-CH1; VH3-VH4-VL4-VL3-CL-CH1; VL3-L6-VL4-L7-VH4-L8-VH3-L9-CH1; VH3-L6-VH4-L7-VL4-L8-VL3-L9-CH1; VL3-L6-VL4-L7-VH4-L8-VH3-L9-CL; VH3-L6-VH4-L7-VL4-L8-VL3-L9-CL; VL3-L6-VL4-L7-VH4-L8-VH3- L9-CH1-L10-CL; VH3-L6-VH4-L7-VL4-L8-VL3-L9-CH1-L10-CL; VL3-L6-VL4-L7-VH4-L8-VH3-L9-CL-L10-CH1; or VH3-L6-VH4-L7-VL4-L8-VL3-L9-CL-L10-CH1. In some aspects, the first polypeptide has a structure represented by VH1-VH2-VL2-VL1-CL-CH1 and the second polypeptide has a structure represented by VL3-VL4-VH4-VH3-CH1; VH3-VH4-VL4-VL3-CH1; VL3-VL4-VH4-VH3-CL; VH3-VH4-VL4-VL3-CL; VL3-VL4-VH4-VH3-CH1-CL; VH3-VH4-VL4-VL3-CH1-CL; VL3-VL4-VH4-VH3-CL-CH1; VH3-VH4-VL4-VL3-CL-CH1; VL3-L6-VL4-L7-VH4-L8-VH3-L9-CH1; VH3-L6-VH4-L7-VL4-L8-VL3-L9-CH1; VL3-L6-VL4-L7-VH4-L8-VH3-L9-CL; VH3-L6-VH4- L7-VL4-L8-VL3-L9-CL; VL3-L6-VL4-L7-VH4-L8-VH3-L9-CH1-L10-CL; VH3-L6-VH4-L7-VL4-L8-VL3-L9-CH1- L10-CL; VL3-L6-VL4-L7-VH4-L8-VH3-L9-CL-L10-CH1; or VH3-L6-VH4-L7-VL4-L8-VL3-L9-CL-L10-CH1. In some aspects, the first polypeptide has a structure represented by VL1-L1-VL2-L2-VH2-L3-VH1-L4-CH1 and the second polypeptide has a structure represented by VL3-VL4-VH4-VH3-CH1; VH3-VH4-VL4-VL3-CH1; VL3-VL4-VH4-VH3-CL; VH3-VH4-VL4-VL3-CL; VL3-VL4-VH4-VH3-CH1-CL; VH3-VH4-VL4-VL3-CH1-CL; VL3-VL4-VH4-VH3-CL-CH1; VH3-VH4-VL4-VL3-CL-CH1; VL3-L6-VL4-L7-VH4-L8-VH3-L9-CH1; VH3-L6-VH4-L7-VL4-L8-VL3-L9-CH1; VL3-L6-VL4-L7-VH4-L8-VH3-L9-CL; VH3-L6-VH4-L7-VL4-L8-VL3-L9-CL; VL3-L6-VL4-L7-VH4- L8-VH3-L9-CH1-L10-CL; VH3-L6-VH4-L7-VL4-L8-VL3-L9-CH1-L10-CL; VL3-L6-VL4-L7-VH4-L8-VH3-L9-CL-L10-CH1; or VH3-L6-VH4-L7-VL4-L8-VL3-L9-CL-L10-CH1. In some aspects, the first polypeptide has a structure represented by VH1-L1-VH2-L2-VL2-L3-VL1-L4-CH1 and the second polypeptide has a structure represented by VL3-VL4-VH4-VH3-CH1; VH3-VH4-VL4-VL3-CH1; VL3-VL4-VH4-VH3-CL; VH3-VH4-VL4-VL3-CL; VL3-VL4-VH4-VH3-CH1-CL; VH3-VH4-VL4-VL3-CH1-CL; VL3-VL4-VH4-VH3-CL-CH1; VH3-VH4-VL4-VL3-CL-CH1; VL3-L6-VL4-L7-VH4-L8-VH3-L9-CH1; VH3-L6-VH4-L7-VL4-L8-VL3-L9-CH1; VL3-L6-VL4-L7-VH4-L8-VH3-L9-CL; VH3-L6-VH4-L7-VL4-L8-VL3-L9-CL; VL3-L6-VL4-L7-VH4-L8-VH3-L9-CH1-L10-CL; VH3-L6-VH4-L7-VL4- L8-VL3-L9-CH1-L10-CL; VL3-L6-VL4-L7-VH4-L8-VH3-L9-CL-L10-CH1; or VH3-L6-VH4-L7-VL4-L8-VL3-L9-CL-L10-CH1. In some aspects, the first polypeptide has a structure represented by VL1-L1-VL2-L2-VH2-L3-VH1-L4-CL and the second polypeptide has a structure represented by VL3-VL4-VH4-VH3-CH1; VH3-VH4-VL4-VL3-CH1; VL3-VL4-VH4-VH3-CL; VH3-VH4-VL4-VL3-CL; VL3-VL4-VH4-VH3-CH1-CL; VH3-VH4-VL4-VL3-CH1-CL; VL3-VL4-VH4-VH3-CL-CH1; VH3-VH4-VL4-VL3-CL-CH1; VL3-L6-VL4-L7-VH4-L8-VH3-L9-CH1; VH3-L6-VH4-L7-VL4-L8-VL3-L9-CH1; VL3-L6-VL4-L7-VH4-L8-VH3-L9-CL; VH3-L6-VH4-L7-VL4-L8-VL3-L9-CL; VL3-L6- VL4-L7-VH4-L8-VH3-L9-CH1-L10-CL; VH3-L6-VH4-L7-VL4-L8-VL3-L9-CH1-L10-CL; VL3-L6-VL4-L7-VH4-L8-VH3-L9-CL-L10-CH1; or VH3-L6-VH4-L7-VL4-L8-VL3-L9-CL-L10-CH1. In some aspects, the first polypeptide has a structure represented by VH1-L1-VH2-L2-VL2-L3-VL1-L4-CL and the second polypeptide has a structure represented by VL3-VL4-VH4-VH3-CH1; VH3-VH4-VL4-VL3-CH1; VL3-VL4-VH4-VH3-CL; VH3-VH4-VL4-VL3-CL; VL3-VL4-VH4-VH3-CH1-CL; VH3-VH4-VL4-VL3-CH1-CL; VL3-VL4-VH4-VH3-CL-CH1; VH3-VH4-VL4-VL3-CL-CH1; VL3-L6-VL4-L7-VH4-L8-VH3-L9-CH1; VH3-L6-VH4-L7-VL4-L8-VL3-L9-CH1; VL3-L6-VL4-L7-VH4- L8-VH3-L9-CL; VH3-L6-VH4-L7-VL4-L8-VL3-L9-CL; VL3-L6-VL4-L7-VH4-L8-VH3-L9-CH1-L10-CL; VH3-L6-VH4-L7-VL4-L8-VL3-L9-CH1-L10-CL; VL3-L6-VL4-L7-VH4-L8-VH3-L9-CL-L10-CH1; or VH3-L6-VH4-L7-VL4-L8-VL3-L9-CL-L10-CH1. In some aspects, the first polypeptide has a structure represented by VL1-L1-VL2-L2-VH2-L3-VH1-L4-CH1-L5-CL and the second polypeptide has a structure represented by VL3-VL4-VH4-VH3-CH1; VH3-VH4-VL4-VL3-CH1; VL3-VL4-VH4-VH3-CL; VH3-VH4-VL4-VL3-CL; VL3-VL4-VH4-VH3-CH1-CL; VH3-VH4-VL4-VL3-CH1-CL; VL3-VL4-VH4-VH3-CL-CH1; VH3-VH4-VL4-VL3-CL-CH1; VL3-L6-VL4-L7-VH4-L8-VH3-L9-CH1; VH3-L6-VH4-L7-VL4-L8-VL3-L9-CH1; VL3-L6-VL4-L7-VH4-L8-VH3-L9-CL; VH3-L6-VH4-L7- VL4-L8-VL3-L9-CL; VL3-L6-VL4-L7-VH4-L8-VH3-L9-CH1-L10-CL; VH3-L6-VH4-L7-VL4-L8-VL3-L9-CH1-L10-CL; VL3-L6-VL4-L7-VH4-L8-VH3-L9-CL-L10-CH1; or VH3-L6-VH4-L7-VL4-L8-VL3-L9-CL-L10-CH1. In some aspects, the first polypeptide has a structure represented by VH1-L1-VH2-L2-VL2-L3-VL1-L4-CH1-L5-CL and the second polypeptide has a structure represented by VL3-VL4-VH4-VH3-CH1; VH3-VH4-VL4-VL3-CH1; VL3-VL4-VH4-VH3-CL; VH3-VH4-VL4-VL3-CL; VL3-VL4-VH4-VH3-CH1-CL; VH3-VH4-VL4-VL3-CH1-CL; VL3-VL4-VH4-VH3-CL-CH1; VH3-VH4-VL4-VL3-CL-CH1; VL3-L6-VL4-L7-VH4-L8-VH3-L9-CH1; VH3-L6-VH4-L7-VL4-L8-VL3-L9-CH1; VL3-L6-VL4-L7-VH4-L8-VH3-L9-CL; VH3-L6-VH4-L7-VL4-L8-VL3-L9-CL; VL3-L6-VL4- L7-VH4-L8-VH3-L9-CH1-L10-CL; VH3-L6-VH4-L7-VL4-L8-VL3-L9-CH1-L10-CL; VL3-L6-VL4-L7-VH4-L8-VH3-L9-CL-L10-CH1; or VH3-L6-VH4-L7-VL4-L8-VL3-L9-CL-L10-CH1. In some aspects, the first polypeptide has a structure represented by VL1-L1-VL2-L2-VH2-L3-VH1-L4-CL-L5-CH1 and the second polypeptide has a structure represented by VL3-VL4-VH4-VH3-CH1; VH3-VH4-VL4-VL3-CH1; VL3-VL4-VH4-VH3-CL; VH3-VH4-VL4-VL3-CL; VL3-VL4-VH4-VH3-CH1-CL; VH3-VH4-VL4-VL3-CH1-CL; VL3-VL4-VH4-VH3-CL-CH1; VH3-VH4-VL4-VL3-CL-CH1; VL3-L6-VL4-L7-VH4-L8-VH3-L9-CH1; VH3-L6-VH4-L7-VL4-L8-VL3-L9-CH1; VL3-L6-VL4- L7-VH4-L8-VH3-L9-CL; VH3-L6-VH4-L7-VL4-L8-VL3-L9-CL; VL3-L6-VL4-L7-VH4-L8-VH3-L9-CH1-L10-CL; VH3-L6-VH4-L7-VL4-L8-VL3-L9-CH1-L10-CL; VL3-L6-VL4-L7-VH4-L8-VH3-L9-CL-L10-CH1; or VH3-L6-VH4-L7-VL4-L8-VL3-L9-CL-L10-CH1. In some aspects, the first polypeptide has a structure represented by VH1-L1-VH2-L2-VL2-L3-VL1-L4-CL-L5-CH1 and the second polypeptide has a structure represented by VL3-VL4-VH4-VH3-CH1; VH3-VH4-VL4-VL3-CH1; VL3-VL4-VH4-VH3-CL; VH3-VH4-VL4-VL3-CL; VL3-VL4-VH4-VH3-CH1-CL; VH3-VH4-VL4-VL3-CH1-CL; VL3-VL4-VH4-VH3-CL-CH1; VH3-VH4-VL4-VL3-CL-CH1; VL3-L6-VL4-L7-VH4-L8-VH3-L9-CH1; VH3-L6-VH4-L7-VL4-L8-VL3-L9-CH1; VL3-L6-VL4-L7-VH4-L8-VH3-L9-CL; VH3-L6-VH4- L7-VL4-L8-VL3-L9-CL; VL3-L6-VL4-L7-VH4-L8-VH3-L9-CH1-L10-CL; VH3-L6-VH4-L7-VL4-L8-VL3-L9-CH1- L10-CL; VL3-L6-VL4-L7-VH4-L8-VH3-L9-CL-L10-CH1; or VH3-L6-VH4-L7-VL4-L8-VL3-L9-CL-L10-CH1.

[0301] In other aspects, the invention is directed to an antigen binding polypeptide complex comprising a first polypeptide and a second polypeptide; wherein the first polypeptide has a structure represented by VL1-VL2-VH2-VH1-CH1-Fc; VH1-VH2-VL2-VL1-CH1-Fe; VL1-VL2-VH2-VH1-CL-Fc; VH1-VH2-VL2-VL1-CL-Fc; VL1-VL2-VH2-VH1-CH1-CL-Fc; VH1-VH2-VL2-VL1-CH1-CL-Fe; VL1-VL2-VH2-VH1-CL-CH1-Fc; VH1-VH2-VL2-VL1-CL-CH1-Fc; VL1-L1-VL2-L2-VH2-L3-VH1-L4-CH1-Fc; VH1-L1-VH2-L2-VL2-L3-VL1-L4-CH1-Fe; VL1-L1-VL2-L2-VH2-L3-VH1-L4-CL-Fc; VH1-L1-VH2-L2-VL2-L3-VL1-L4-CL-Fc; VL1-L1-VL2-L2-VH2-L3-VH1-L4-CH1-L5-CL- Fe; VH1-L1-VH2-L2-VL2-L3-VL1-L4-CH1-L5-CL-Fe; VL1-L1-VL2-L2-VH2-L3-VH1-L4-CL-L5-CH1-Fc; or VH1-L1-VH2-L2-VL2-L3-VL1-L4-CL-L5-CH1-Fe; wherein the second polypeptide has a structure represented by VL3-VL4-VH4-VH3-CH1-Fc; VH3-VH4-VL4-VL3-CH1-Fc; VL3-VL4-VH4-VH3-CL-Fc; VH3-VH4-VL4-VL3-CL-Fc; VL3-VL4-VH4-VH3-CH1-CL-Fc; VH3-VH4-VL4-VL3-CH1-CL-Fc; VL3-VL4-VH4-VH3-CL-CH1-Fc; VH3-VH4-VL4-VL3-CL-CH1-Fc; VL3-L6-VL4-L7-VH4-L8-VH3-L9-CH1-Fc; VH3-L6-VH4-L7-VL4-L8-VL3-L9-CH1-Fe; VL3-L6-VL4-L7-VH4-L8-VH3-L9-CL-Fc; VH3-L6-VH4-L7-VL4-L8-VL3-L9-CL-Fc; VL3-L6-VL4-L7-VH4-L8-VH3-L9-CH1-L10-CL-Fe; VH3-L6-VH4-L7-VL4-L8-VL3-L9-CH1-L10-CL-Fc; VL3-L6-VL4-L7-VH4-L8-VH3-L9-CL-L10-CH1-Fc; or VH3-L6-VH4-L7-VL4-L8-VL3-L9-CL-L10-CH1-Fc; wherein VL1 is a first immunoglobulin light chain variable region that specifically binds to an HIV protein; VL2 is a second immunoglobulin light chain variable region that specifically binds to an HIV protein; VL3 is a third immunoglobulin light chain variable region that specifically binds to an HIV protein; VL4 is a fourth immunoglobulin light chain variable region that specifically binds to an HIV protein; VH1 is a first immunoglobulin heavy chain variable region that specifically binds to an HIV protein; VH2 is a second immunoglobulin heavy chain variable region that specifically binds to an HIV protein; VH3 is a third immunoglobulin heavy chain variable region that specifically binds to an HIV protein; VH4 is a fourth immunoglobulin heavy chain variable region that specifically binds to an HIV protein; Fc is a region comprising an immunoglobulin heavy chain constant region 2 (CH2), an immunoglobulin heavy chain constant region 3 (CH3), and optionally, an immunoglobulin hinge; CH1 is an immunoglobulin heavy chain constant region 1; CL is an immunoglobulin light chain constant region; and L1, L2, L3, L4, L5, L6, L7, L8, L9, L10, L11 and L12 are amino acid linkers. In some aspects, the first polypeptide has a structure represented by VL1-VL2-VH2-VH1-CH1-Fc, and the second polypeptide has a structure represented by VL3-VL4-VH4-VH3-CH1-Fc; VH3-VH4-VL4-VL3-CH1-Fc; VL3-VL4-VH4-VH3-CL-Fc; VH3-VH4-VL4-VL3-CL-Fc; VL3-VL4-VH4-VH3-CH1-CL-Fe; VH3-VH4-VL4-VL3-CH1-CL-Fc; VL3-VL4-VH4-VH3-CL-CH1-Fc; VH3-VH4-VL4-VL3-CL-CH1-Fc; VL3-L6-VL4-L7-VH4-L8-VH3-L9-CH1-Fc; VH3-L6-VH4-L7-VL4-L8-VL3-L9-CH1-Fc; VL3-L6-VL4-L7-VH4-L8-VH3-L9-CL-Fc; VH3-L6-VH4-L7-VL4-L8-VL3-L9-CL-Fc; VL3-L6-VL4-L7-VH4-L8-VH3-L9-CH1-L10-CL-Fc; VH3-L6-VH4-L7-VL4-L8-VL3-L9-CH1-L10-CL-Fc; VL3-L6-VL4-L7-VH4-L8-VH3-L9-CL-L10-CH1-Fc; or VH3-L6-VH4-L7-VL4-L8-VL3-L9-CL-L10-CH1-F c. In some aspects, the first polypeptide has a structure represented by VH1-VH2-VL2-VL1-CH1-Fc, and the second polypeptide has a structure represented by VL3-VL4-VH4-VH3-CH1-Fc; VH3-VH4-VL4-VL3-CH1-Fc; VL3-VL4-VH4-VH3-CL-Fc; VH3-VH4-VL4-VL3-CL-Fc; VL3-VL4-VH4-VH3-CH1-CL-Fe; VH3-VH4-VL4-VL3-CH1-CL-Fc; VL3-VL4-VH4-VH3-CL-CH1-Fc; VH3-VH4-VL4-VL3-CL-CH1-Fc; VL3-L6-VL4-L7-VH4-L8-VH3-L9-CH1-Fc; VH3-L6-VH4-L7-VL4-L8-VL3-L9-CH1-Fc; VL3-L6-VL4-L7-VH4-L8-VH3-L9-CL-Fc; VH3-L6-VH4-L7-VL4-L8-VL3-L9-CL-Fc; VL3-L6-VL4-L7-VH4-L8-VH3-L9-CH1-L10-CL-Fc; VH3-L6-VH4-L7-VL4-L8-VL3-L9-CH1-L10-CL-Fc; VL3-L6-VL4-L7-VH4-L8-VH3-L9-CL-L10-CH1-Fc; or VH3-L6-VH4-L7-VL4-L8-VL3-L9-CL-L10-CH1-F c. In some aspects, the first polypeptide has a structure represented by VL1-VL2-VH2-VH1-CL-Fc, and the second polypeptide has a structure represented by VL3-VL4-VH4-VH3-CH1-Fc; VH3-VH4-VL4-VL3-CH1-Fc; VL3-VL4-VH4-VH3-CL-Fc; VH3-VH4-VL4-VL3-CL-Fc; VL3-VL4-VH4-VH3-CH1-CL-Fe; VH3-VH4-VL4-VL3-CH1-CL-Fc; VL3-VL4-VH4-VH3-CL-CH1-Fc; VH3-VH4-VL4-VL3-CL-CH1-Fc; VL3-L6-VL4-L7-VH4-L8-VH3-L9-CH1-Fc; VH3-L6-VH4-L7-VL4-L8-VL3-L9-CH1-Fc; VL3-L6-VL4-L7-VH4-L8-VH3-L9-CL-Fc; VH3-L6-VH4-L7-VL4-L8-VL3-L9-CL-Fc; VL3-L6-VL4-L7-VH4-L8-VH3-L9-CH1-L10-CL-Fc; VH3-L6-VH4-L7-VL4-L8-VL3-L9-CH1-L10-CL-Fc; VL3-L6-VL4-L7-VH4-L8-VH3-L9-CL-L10-CH1-Fc; or VH3-L6-VH4-L7-VL4-L8-VL3-L9-CL-L10-CH1-F c. In some aspects, the first polypeptide has a structure represented by VH1-VH2-VL2-VL1-CL-Fc, and the second polypeptide has a structure represented by VL3-VL4-VH4-VH3-CH1-Fc; VH3-VH4-VL4-VL3-CH1-Fc; VL3-VL4-VH4-VH3-CL-Fc; VH3-VH4-VL4-VL3-CL-Fc; VL3-VL4-VH4-VH3-CH1-CL-Fe; VH3-VH4-VL4-VL3-CH1-CL-Fc; VL3-VL4-VH4-VH3-CL-CH1-Fc; VH3-VH4-VL4-VL3-CL-CH1-Fc; VL3-L6-VL4-L7-VH4-L8-VH3-L9-CH1-Fc; VH3-L6-VH4-L7-VL4-L8-VL3-L9-CH1-Fc; VL3-L6-VL4-L7-VH4-L8-VH3-L9-CL-Fc; VH3-L6-VH4-L7-VL4-L8-VL3-L9-CL-Fc; VL3-L6-VL4-L7-VH4-L8-VH3-L9-CH1-L10-CL-Fc; VH3-L6-VH4-L7-VL4-L8-VL3-L9-CH1-L10-CL-Fc; VL3-L6-VL4-L7-VH4-L8-VH3-L9-CL-L10-CH1-Fc; or VH3-L6-VH4-L7-VL4-L8-VL3-L9-CL-L10-CH1-F c. In some aspects, the first polypeptide has a structure represented by VL1-VL2-VH2-VH1-CH1-CL-Fc, and the second polypeptide has a structure represented by VL3-VL4-VH4-VH3-CH1-Fc; VH3-VH4-VL4-VL3-CH1-Fc; VL3-VL4-VH4-VH3-CL-Fc; VH3-VH4-VL4-VL3-CL-Fc; VL3-VL4-VH4-VH3-CH1-CL-Fe; VH3-VH4-VL4-VL3-CH1-CL-Fc; VL3-VL4-VH4-VH3-CL-CH1-Fc; VH3-VH4-VL4-VL3-CL-CH1-Fc; VL3-L6-VL4-L7-VH4-L8-VH3-L9-CH1-Fc; VH3-L6-VH4-L7-VL4-L8-VL3-L9-CH1-Fc; VL3-L6-VL4-L7-VH4-L8-VH3-L9-CL-Fc; VH3-L6-VH4-L7-VL4-L8-VL3-L9-CL-Fc; VL3-L6-VL4-L7-VH4-L8-VH3-L9-CH1-L10-CL-Fc; VH3-L6-VH4-L7-VL4-L8-VL3-L9-CH1-L10-CL-Fc; VL3-L6-VL4-L7-VH4-L8-VH3-L9-CL-L10-CH1-Fc; or VH3-L6-VH4-L7-VL4-L8-VL3-L9-CL-L10-CH1-F c. In some aspects, the first polypeptide has a structure represented by VH1-VH2-VL2-VL1-CH1-CL-Fc, and the second polypeptide has a structure represented by VL3-VL4-VH4-VH3-CH1-Fc; VH3-VH4-VL4-VL3-CH1-Fc; VL3-VL4-VH4-VH3-CL-Fc; VH3-VH4-VL4-VL3-CL-Fc; VL3-VL4-VH4-VH3-CH1-CL-Fe; VH3-VH4-VL4-VL3-CH1-CL-Fc; VL3-VL4-VH4-VH3-CL-CH1-Fc; VH3-VH4-VL4-VL3-CL-CH1-Fc; VL3-L6-VL4-L7-VH4-L8-VH3-L9-CH1-Fc; VH3-L6-VH4-L7-VL4-L8-VL3-L9-CH1-Fc; VL3-L6-VL4-L7-VH4-L8-VH3-L9-CL-Fc; VH3-L6-VH4-L7-VL4-L8-VL3-L9-CL-Fc; VL3-L6-VL4-L7-VH4-L8-VH3-L9-CH1-L10-CL-Fc; VH3-L6-VH4-L7-VL4-L8-VL3-L9-CH1-L10-CL-Fc; VL3-L6-VL4-L7-VH4-L8-VH3-L9-CL-L10-CH1-Fc; or VH3-L6-VH4-L7-VL4-L8-VL3-L9-CL-L10-CH1-F c. In some aspects, the first polypeptide has a structure represented by VL1-VL2-VH2-VH1-CL-CH1-Fc, and the second polypeptide has a structure represented by VL3-VL4-VH4-VH3-CH1-Fc; VH3-VH4-VL4-VL3-CH1-Fc; VL3-VL4-VH4-VH3-CL-Fc; VH3-VH4-VL4-VL3-CL-Fc; VL3-VL4-VH4-VH3-CH1-CL-Fe; VH3-VH4-VL4-VL3-CH1-CL-Fc; VL3-VL4-VH4-VH3-CL-CH1-Fc; VH3-VH4-VL4-VL3-CL-CH1-Fc; VL3-L6-VL4-L7-VH4-L8-VH3-L9-CH1-Fc; VH3-L6-VH4-L7-VL4-L8-VL3-L9-CH1-Fc; VL3-L6-VL4-L7-VH4-L8-VH3-L9-CL-Fc; VH3-L6-VH4-L7-VL4-L8-VL3-L9-CL-Fc; VL3-L6-VL4-L7-VH4-L8-VH3-L9-CH1-L10-CL-Fc; VH3-L6-VH4-L7-VL4-L8-VL3-L9-CH1-L10-CL-Fc; VL3-L6-VL4-L7-VH4-L8-VH3-L9-CL-L10-CH1-Fc; or VH3-L6-VH4-L7-VL4-L8-VL3-L9-CL-L10-CH1-F c. In some aspects, the first polypeptide has a structure represented by VH1-VH2-VL2-VL1-CL-CH1-Fc, and the second polypeptide has a structure represented by VL3-VL4-VH4-VH3-CH1-Fc; VH3-VH4-VL4-VL3-CH1-Fc; VL3-VL4-VH4-VH3-CL-Fc; VH3-VH4-VL4-VL3-CL-Fc; VL3-VL4-VH4-VH3-CH1-CL-Fe; VH3-VH4-VL4-VL3-CH1-CL-Fc; VL3-VL4-VH4-VH3-CL-CH1-Fc; VH3-VH4-VL4-VL3-CL-CH1-Fc; VL3-L6-VL4-L7-VH4-L8-VH3-L9-CH1-Fc; VH3-L6-VH4-L7-VL4-L8-VL3-L9-CH1-Fc; VL3-L6-VL4-L7-VH4-L8-VH3-L9-CL-Fc; VH3-L6-VH4-L7-VL4-L8-VL3-L9-CL-Fc; VL3-L6-VL4-L7-VH4-L8-VH3-L9-CH1-L10-CL-Fc; VH3-L6-VH4-L7-VL4-L8-VL3-L9-CH1-L10-CL-Fc; VL3-L6-VL4-L7-VH4-L8-VH3-L9-CL-L10-CH1-Fc; or VH3-L6-VH4-L7-VL4-L8-VL3-L9-CL-L10-CH1-F c. In some aspects, the first polypeptide has a structure represented by VL1-L1-VL2-L2-VH2-L3-VH1-L4-CH1-Fe, and the second polypeptide has a structure represented by VL3-VL4-VH4-VH3-CH1-Fc; VH3-VH4-VL4-VL3-CH1-Fc; VL3-VL4-VH4-VH3-CL-Fc; VH3-VH4-VL4-VL3-CL-Fc; VL3-VL4-VH4-VH3-CH1-CL-Fc; VH3-VH4-VL4-VL3-CH1-CL-Fc; VL3-VL4-VH4-VH3-CL-CH1-Fc; VH3-VH4-VL4-VL3-CL-CH1-Fc; VL3-L6-VL4-L7-VH4-L8-VH3-L9-CH1-Fc; VH3-L6-VH4-L7-VL4-L8-VL3-L9-CH1-Fc; VL3-L6-VL4-L7-VH4-L8-VH3-L9-CL-Fc; VH3-L6-VH4-L7-VL4-L8-VL3-L9-CL-Fc; VL3-L6-VL4-L7-VH4-L8-VH3-L9-CH1-L10-CL-Fc; VH3-L6-VH4-L7-VL4-L8-VL3-L9-CH1-L10-CL-Fc; VL3-L6-VL4-L7-VH4-L8-VH3-L9-CL-L10-CH1-Fc; or VH3-L6-VH4-L7-VL4-L8-VL3-L9-CL-L10-CH1-Fc. In some aspects, the first polypeptide has a structure represented by VH1-L1-VH2-L2-VL2-L3-VL1-L4-CH1-Fe, and the second polypeptide has a structure represented by VL3-VL4-VH4-VH3-CH1-Fc; VH3-VH4-VL4-VL3-CH1-Fc; VL3-VL4-VH4-VH3-CL-Fc; VH3-VH4-VL4-VL3-CL-Fc; VL3-VL4-VH4-VH3-CH1-CL-Fc; VH3-VH4-VL4-VL3-CH1-CL-Fc; VL3-VL4-VH4-VH3-CL-CH1-Fc; VH3-VH4-VL4-VL3-CL-CH1-Fc; VL3-L6-VL4-L7-VH4-L8-VH3-L9-CH1-Fc; VH3-L6-VH4-L7-VL4-L8-VL3-L9-CH1-Fc; VL3-L6-VL4-L7-VH4-L8-VH3-L9-CL-Fc; VH3-L6-VH4-L7-VL4-L8-VL3-L9-CL-Fc; VL3-L6-VL4-L7-VH4-L8-VH3-L9-CH1-L10-CL-Fc; VH3-L6-VH4-L7-VL4-L8-VL3-L9-CH1-L10-CL-Fc; VL3-L6-VL4-L7-VH4-L8-VH3-L9-CL-L10-CH1-Fc; or VH3-L6-VH4-L7-VL4-L8-VL3-L9-CL-L10-CH1-Fc. In some aspects, the first polypeptide has a structure represented by VL1-L1-VL2-L2-VH2-L3-VH1-L4-CL-Fc, and the second polypeptide has a structure represented by VL3-VL4-VH4-VH3-CH1-Fc; VH3-VH4-VL4-VL3-CH1-Fc; VL3-VL4-VH4-VH3-CL-Fc; VH3-VH4-VL4-VL3-CL-Fc; VL3-VL4-VH4-VH3-CH1-CL-Fc; VH3-VH4-VL4-VL3-CH1-CL-Fc; VL3-VL4-VH4-VH3-CL-CH1-Fc; VH3-VH4-VL4-VL3-CL-CH1-Fc; VL3-L6-VL4-L7-VH4-L8-VH3-L9-CH1-Fc; VH3-L6-VH4-L7-VL4-L8-VL3-L9-CH1-Fc; VL3-L6-VL4-L7-VH4-L8-VH3-L9-CL-Fc; VH3-L6-VH4-L7-VL4-L8-VL3-L9-CL-Fc; VL3-L6-VL4-L7-VH4-L8-VH3-L9-CH1-L10-CL-Fc; VH3-L6-VH4-L7-VL4-L8-VL3-L9-CH1-L10-CL-Fc; VL3-L6-VL4-L7-VH4-L8-VH3-L9-CL-L10-CH1-Fc; or VH3-L6-VH4-L7-VL4-L8-VL3-L9-CL-L10-CH1-Fc. In some aspects, the first polypeptide has a structure represented by VH1-L1-VH2-L2-VL2-L3-VL1-L4-CL-Fc, and the second polypeptide has a structure represented by VL3-VL4-VH4-VH3-CH1-Fc; VH3-VH4-VL4-VL3-CH1-Fc; VL3-VL4-VH4-VH3-CL-Fc; VH3-VH4-VL4-VL3-CL-Fc; VL3-VL4-VH4-VH3-CH1-CL-Fc; VH3-VH4-VL4-VL3-CH1-CL-Fc; VL3-VL4-VH4-VH3-CL-CH1-Fc; VH3-VH4-VL4-VL3-CL-CH1-Fc; VL3-L6-VL4-L7-VH4-L8-VH3-L9-CH1-Fc; VH3-L6-VH4-L7-VL4-L8-VL3-L9-CH1-Fc; VL3-L6-VL4-L7-VH4-L8-VH3-L9-CL-Fc; VH3-L6-VH4-L7-VL4-L8-VL3-L9-CL-Fc; VL3-L6-VL4-L7-VH4-L8-VH3-L9-CH1-L10-CL-Fc; VH3-L6-VH4-L7-VL4-L8-VL3-L9-CH1-L10-CL-Fc; VL3-L6-VL4-L7-VH4-L8-VH3-L9-CL-L10-CH1-Fc; or VH3-L6-VH4-L7-VL4-L8-VL3-L9-CL-L10-CH1-Fc. In some aspects, the first polypeptide has a structure represented by VL1-L1-VL2-L2-VH2-L3-VH1-L4-CH1-L5-CL-Fc, and the second polypeptide has a structure represented by VL3-VL4-VH4-VH3-CH1-Fc; VH3-VH4-VL4-VL3-CH1-Fc; VL3-VL4-VH4-VH3-CL-Fc; VH3-VH4-VL4-VL3-CL-Fc; VL3-VL4-VH4-VH3-CH1-CL-Fc; VH3-VH4-VL4-VL3-CH1-CL-Fc; VL3-VL4-VH4-VH3-CL-CH1-Fc; VH3-VH4-VL4-VL3-CL-CH1-Fc; VL3-L6-VL4-L7-VH4-L8-VH3-L9-CH1-Fc; VH3-L6-VH4-L7-VL4-L8-VL3-L9-CH1-Fc; VL3-L6-VL4-L7-VH4-L8-VH3-L9-CL-Fc; VH3-L6-VH4-L7-VL4-L8-VL3-L9-CL-Fc; VL3-L6-VL4-L7-VH4-L8-VH3-L9-CH1-L10-CL-Fc; VH3-L6-VH4-L7-VL4-L8-VL3-L9-CH1-L10-CL-Fc; VL3-L6-VL4-L7-VH4-L8-VH3-L9-CL-L10-CH1-Fc; or VH3-L6-VH4-L7-VL4-L8-VL3-L9-CL-L10-CH1-Fc. In some aspects, the first polypeptide has a structure represented by VH1-L1-VH2-L2-VL2-L3-VL1-L4-CH1-L5-CL-Fc, and the second polypeptide has a structure represented by VL3-VL4-VH4-VH3-CH1-Fc; VH3-VH4-VL4-VL3-CH1-Fc; VL3-VL4-VH4-VH3-CL-Fc; VH3-VH4-VL4-VL3-CL-Fc; VL3-VL4-VH4-VH3-CH1-CL-Fc; VH3-VH4-VL4-VL3-CH1-CL-Fc; VL3-VL4-VH4-VH3-CL-CH1-Fc; VH3-VH4-VL4-VL3-CL-CH1-Fc; VL3-L6-VL4-L7-VH4-L8-VH3-L9-CH1-Fc; VH3-L6-VH4-L7-VL4-L8-VL3-L9-CH1-Fc; VL3-L6-VL4-L7-VH4- L8-VH3-L9-CL-Fc; VH3-L6-VH4-L7-VL4-L8-VL3-L9-CL-Fc; VL3-L6-VL4-L7-VH4-L8-VH3-L9-CH1-L10-CL-Fc; VH3-L6-VH4-L7-VL4-L8-VL3-L9-CH1-L10-CL-Fc; VL3-L6-VL4-L7-VH4-L8-VH3-L9-CL-L10-CH1-Fc; or VH3-L6-VH4-L7-VL4-L8-VL3-L9-CL-L10-CH1-Fc. In some aspects, the first polypeptide has a structure represented by VL1-L1-VL2-L2-VH2-L3-VH1-L4-CL-L5-CH1-Fc, and the second polypeptide has a structure represented by VL3-VL4-VH4-VH3-CH1-Fc; VH3-VH4-VL4-VL3-CH1-Fc; VL3-VL4-VH4-VH3-CL-Fc; VH3-VH4-VL4-VL3-CL-Fc; VL3-VL4-VH4-VH3-CH1-CL-Fc; VH3-VH4-VL4-VL3-CH1-CL-Fc; VL3-VL4-VH4-VH3-CL-CH1-Fc; VH3-VH4-VL4-VL3-CL-CH1-Fc; VL3-L6-VL4-L7-VH4-L8-VH3-L9-CH1-Fc; VH3-L6-VH4-L7-VL4-L8-VL3-L9-CH1-Fc; VL3-L6-VL4-L7-VH4-L8-VH3-L9-CL-Fc; VH3-L6-VH4-L7-VL4-L8-VL3-L9-CL-Fc; VL3-L6-VL4-L7-VH4-L8-VH3-L9-CH1-L10-CL-Fc; VH3-L6-VH4-L7-VL4-L8-VL3-L9-CH1-L10-CL-Fc; VL3-L6-VL4-L7-VH4-L8-VH3-L9-CL-L10-CH1-Fc; or VH3-L6-VH4-L7-VL4-L8-VL3-L9-CL-L10-CH1-Fc. In some aspects, the first polypeptide has a structure represented by VH1-L1-VH2-L2-VL2-L3-VL1-L4-CL-L5-CH1-Fc, and the second polypeptide has a structure represented by VL3-VL4-VH4-VH3-CH1-Fc; VH3-VH4-VL4-VL3-CH1-Fc; VL3-VL4-VH4-VH3-CL-Fc; VH3-VH4-VL4-VL3-CL-Fc; VL3-VL4-VH4-VH3-CH1-CL-Fc; VH3-VH4-VL4-VL3-CH1-CL-Fc; VL3-VL4-VH4-VH3-CL-CH1-Fc; VH3-VH4-VL4-VL3-CL-CH1-Fc; VL3-L6-VL4-L7-VH4-L8-VH3-L9-CH1-Fc; VH3-L6-VH4-L7-VL4-L8-VL3-L9-CH1-Fc; VL3-L6-VL4-L7-VH4-L8-VH3-L9-CL-Fc; VH3-L6-VH4-L7-VL4-L8-VL3-L9-CL-Fc; VL3-L6-VL4-L7-VH4-L8-VH3-L9-CH1-L10-CL-Fc; VH3-L6-VH4-L7-VL4-L8-VL3-L9-CH1-L10-CL-Fc; VL3-L6-VL4-L7-VH4-L8-VH3-L9-CL-L10-CH1-Fc; or VH3-L6-VH4-L7-VL4-L8-VL3-L9-CL-L10-CH1-Fc.

[0302] In other aspects, the invention is directed to an antigen binding polypeptide complex comprising a first polypeptide and a second polypeptide; wherein the first polypeptide has a structure represented by VL1-VL2-VH2-VH1; VH1-VH2-VL2-VL1; VL1-VL2-VH2-VH1-Fc; VH1-VH2-VL2-VL1-Fc; VL1-VL2-VH2-VH1-CH1; VH1-VH2-VL2-VL1-CH1; VL1-VL2-VH2-VH1-CL; VH1-VH2-VL2-VL1-CL; VL1-VL2-VH2-VH1-CH1-CL; VH1-VH2-VL2-VL1-CH1-CL; VL1-VL2-VH2-VH1-CL-CH1; VH1-VH2-VL2-VL1-CL-CH1; VL1-VL2-VH2-VH1-CH1-Fc; VH1-VH2-VL2-VL1-CH1-Fc; VL1-VL2-VH2-VH1-CL-Fc; VH1-VH2-VL2-VL1-CL-Fc; VL1-VL2-VH2-VH1-CH1-CL-Fc; VH1-VH2-VL2-VL1-CH1-CL-Fc; VL1-VL2-VH2-VH1-CL-CH1-Fc; VH1-VH2-VL2-VL1-CL-CH1-Fc; VL1-L1-VL2-L2-VH2-L3-VH1; VH1-L1-VH2-L2-VL2-L3-VL1; VL1-L1-VL2-L2-VH2-L3-VH1-Fc; VH1-L1-VH2-L2-VL2- L3-VL1-Fc; VL1-L1-VL2-L2-VH2-L3-VH1-L4-Fc; VH1-L1-VH2-L2-VL2-L3-VL1-L4-Fc; VL1-L1-VL2-L2-VH2-L3-VH1-L4-CH1; VH1-L1-VH2-L2-VL2-L3-VL1-L4-CH1; VL1-L1-VL2-L2-VH2-L3-VH1-L4-CL; VH1-L1-VH2- L2-VL2-L3-VL1-L4-CL; VL1-L1-VL2-L2-VH2-L3-VH1-L4-CH1-L5-CL; VH1-L1-VH2-L2-VL2-L3-VL1-L4-CH1- L5-CL; VL1-L1-VL2-L2-VH2-L3-VH1-L4-CL-L5-CH1; VH1-L1-VH2-L2-VL2-L3-VL1-L4-CL-L5-CH1; VL1-L1-VL2-L2-VH2-L3-VH1-L4-CH1-Fc; VH1-L1-VH2-L2-VL2-L3-VL1-L4-CH1-Fc; VL1-L1-VL2-L2-VH2-L3-VH1-L4- CL-Fc; VH1-L1-VH2-L2-VL2-L3-VL1-L4-CL-Fc; VL1-L1-VL2-L2-VH2-L3-VH1-L4-CH1-L5-CL-Fc; VH1-L1-VH2-L2-VL2-L3-VL1-L4-CH1-L5-CL-Fc; VL1-L1-VL2-L2-VH2-L3-VH1-L4-CL-L5-CH1-Fc; or VH1-L1-VH2-L2-VL2-L3-VL1-L4-CL-L5-CH1-Fc; wherein the second polypeptide has a structure represented by VL3-VL4-VH4-VH3; VH3-VH4-VL4-VL3; VL3-VL4-VH4-VH3-Fc; VH3-VH4-VL4-VL3-Fc; VL3-VL4-VH4-VH3-CH1; VH3-VH4-VL4-VL3-CH1; VL3-VL4-VH4-VH3-CL; VH3-VH4-VL4-VL3-CL; VL3-VL4-VH4-VH3-CH1-CL; VH3-VH4-VL4-VL3-CH1-CL; VL3-VL4-VH4-VH3-CL-CH1; VH3-VH4-VL4-VL3-CL-CH1; VL3-VL4-VH4-VH3-CH1-Fc; VH3-VH4-VL4-VL3-CH1-Fc; VL3-VL4-VH4-VH3-CL-Fc; VH3-VH4-VL4-VL3-CL-Fc; VL3-VL4-VH4-VH3-CH1-CL-Fc; VH3-VH4-VL4-VL3-CH1-CL-Fc; VL3-VL4-VH4-VH3-CL-CH1-Fc; VH3-VH4-VL4-VL3-CL-CH1-Fc; VL3-L6-VL4-L7-VH4-L8-VH3; VH3-L6-VH4-L7-VL4-L8-VL3; VL3-L6-VL4-L7-VH4-L8-VH3-Fc; VH3-L6-VH4-L7-VL4-L8- VL3-Fc; VL3-L6-VL4-L7-VH4-L8-VH3-L9-Fc; VH3-L6-VH4-L7-VL4-L8-VL3-L9-Fc; VL3-L6-VL4-L7-VH4-L8-VH3-L9-CH1; VH3-L6-VH4-L7-VL4-L8-VL3-L9-CH1; VL3-L6-VL4-L7-VH4-L8-VH3-L9-CL; VH3-L6-VH4-L7-VL4- L8-VL3-L9-CL; VL3-L6-VL4-L7-VH4-L8-VH3-L9-CH1-L10-CL; VH3-L6-VH4-L7-VL4-L8-VL3-L9-CH1-L10-CL; VL3-L6-VL4-L7-VH4-L8-VH3-L9-CL-L10-CH1; VH3-L6-VH4-L7-VL4-L8-VL3-L9-CL-L10-CH1; VL3-L6-VL4- L7-VH4-L8-VH3-L9-CH1-Fc; VH3-L6-VH4-L7-VL4-L8-VL3-L9-CH1-Fc; VL3-L6-VL4-L7-VH4-L8-VH3-L9-CL-Fc; VH3-L6-VH4-L7-VL4-L8-VL3-L9-CL-Fc; VL3-L6-VL4-L7-VH4-L8-VH3-L9-CH1-L10-CL-Fc; VH3-L6-VH4-L7-VL4-L8-VL3-L9-CH1-L10-CL-Fc; VL3-L6-VL4-L7-VH4-L8-VH3-L9-CL-L10-CH1-Fc; VH3-L6-VH4-L7-VL4-L8-VL3-L9-CL-L10-CH1-Fc; VL3-L6-VL4-L7-VH4-L8-VH3-L9-CH1-L10-Fc; VH3-L6-VH4-L7-VL4-L8-VL3-L9-CH1-L10-Fc; VL3-L6-VL4-L7-VH4-L8-VH3-L9-CL-L10-Fc; VH3-L6-VH4-L7-VL4-L8-VL3-L9-CL-L10-Fc; VL3-L6-VL4-L7-VH4-L8-VH3-L9-CH1-L10-CL-L11-Fc; VH3-L6-VH4-L7-VL4-L8-VL3-L9-CH1-L10-CL-L11-Fc; VL3-L6-VL4-L7-VH4-L8-VH3-L9-CL-L10-CH1-L11-Fc; or VH3-L6-VH4-L7-VL4-L8-VL3-L9-CL-L10-CH1-L11-Fc; wherein VL1 is a first immunoglobulin light chain variable region that specifically binds to an HIV protein; VL2 is a second immunoglobulin light chain variable region that specifically binds to an HIV protein; VL3 is a third immunoglobulin light chain variable region that specifically binds to an HIV protein; VL4 is a fourth immunoglobulin light chain variable region that specifically binds to an HIV protein; VH1 is a first immunoglobulin heavy chain variable region that specifically binds to an HIV protein; VH2 is a second immunoglobulin heavy chain variable region that specifically binds to an HIV protein; VH3 is a third immunoglobulin heavy chain variable region that specifically binds to an HIV protein; VH4 is a fourth immunoglobulin heavy chain variable region that specifically binds to an HIV protein; Fc is a region comprising an immunoglobulin heavy chain constant region 2 (CH2), an immunoglobulin heavy chain constant region 3 (CH3), and optionally, an immunoglobulin hinge; CH1 is an immunoglobulin heavy chain constant region 1; CL is an immunoglobulin light chain constant region; and L1, L2, L3, L4, L5, L6, L7, L8, L9, L10 or L11 are amino acid linkers. In some aspects, the first polypeptide has a structure represented by VL1-VL2-VH2-VH1, and the second polypeptide has a structure represented by VL3-VL4-VH4-VH3; VH3-VH4-VL4-VL3; VL3-VL4-VH4-VH3-Fc; VH3-VH4-VL4-VL3-Fc; VL3-VL4-VH4-VH3-CH1; VH3-VH4-VL4-VL3-CH1; VL3-VL4-VH4-VH3-CL; VH3-VH4-VL4-VL3-CL; VL3-VL4-VH4-VH3-CH1-CL; VH3-VH4-VL4-VL3-CH1-CL; VL3-VL4-VH4-VH3-CL-CH1; VH3-VH4-VL4-VL3-CL-CH1; VL3-VL4-VH4-VH3-CH1-Fc; VH3-VH4-VL4-VL3-CH1-Fc; VL3-VL4-VH4-VH3-CL-Fc; VH3-VH4-VL4-VL3-CL-Fc; VL3-VL4-VH4-VH3-CH1-CL-Fc; VH3-VH4-VL4-VL3-CH1-CL-Fc; VL3-VL4-VH4-VH3-CL-CH1-Fc; VH3-VH4-VL4-VL3-CL-CH1-Fc; VL3-L6-VL4-L7-VH4-L8-VH3; VH3-L6-VH4-L7-VL4-L8-VL3; VL3-L6-VL4-L7-VH4-L8-VH3-Fc; VH3-L6-VH4-L7-VL4-L8-VL3-Fc; VL3-L6-VL4-L7-VH4-L8-VH3-L9-Fc; VH3-L6-VH4-L7-VL4-L8-VL3-L9-Fc; VL3-L6-VL4-L7-VH4-L8-VH3-L9-CH1; VH3-L6-VH4-L7-VL4-L8-VL3-L9-CH1; VL3-L6-VL4-L7-VH4-L8-VH3-L9-CL; VH3-L6-VH4-L7-VL4-L8-VL3-L9-CL; VL3-L6-VL4-L7-VH4-L8-VH3- L9-CH1-L10-CL; VH3-L6-VH4-L7-VL4-L8-VL3-L9-CH1-L10-CL; VL3-L6-VL4-L7-VH4-L8-VH3-L9-CL-L10-CH1; VH3-L6-VH4-L7-VL4-L8-VL3-L9-CL-L10-CH1; VL3-L6-VL4-L7-VH4-L8-VH3-L9-CH1-Fc; VH3-L6-VH4-L7-VL4-L8-VL3-L9-CH1-Fc; VL3-L6-VL4-L7-VH4-L8-VH3-L9-CL-Fc; VH3-L6-VH4-L7-VL4-L8-VL3-L9-CL-Fc; VL3-L6-VL4-L7-VH4-L8-VH3-L9-CH1-L10-CL-Fc; VH3-L6-VH4-L7-VL4-L8-VL3-L9-CH1-L10-CL-Fc; VL3-L6-VL4-L7-VH4-L8-VH3-L9-CL-L10-CH1-Fc; VH3-L6-VH4-L7-VL4-L8-VL3-L9-CL-L10-CH1-Fc; VL3-L6-VL4-L7-VH4-L8-VH3-L9-CH1-L10-Fc; VH3-L6-VH4-L7-VL4-L8-VL3-L9-CH1-L10-Fc; VL3-L6-VL4-L7-VH4-L8-VH3-L9-CL-L10-Fc; VH3-L6-VH4-L7-VL4-L8-VL3-L9-CL-L10-Fc; VL3-L6-VL4-L7-VH4-L8-VH3-L9-CH1-L10-CL-L11-Fc; VH3-L6-VH4-L7-VL4-L8-VL3-L9-CH1-L10-CL-L11-Fc; VL3-L6-VL4-L7-VH4-L8-VH3-L9-CL-L10-CH1-L11-Fc; or VH3-L6-VH4-L7-VL4-L8-VL3-L9-CL-L10-CH1-L11-Fc. In some aspects, the first polypeptide has a structure represented by VH1-VH2-VL2-VL1, and the second polypeptide has a structure represented by VL3-VL4-VH4-VH3; VH3-VH4-VL4-VL3; VL3-VL4-VH4-VH3-Fc; VH3-VH4-VL4-VL3-Fc; VL3-VL4-VH4-VH3-CH1; VH3-VH4-VL4-VL3-CH1; VL3-VL4-VH4-VH3-CL; VH3-VH4-VL4-VL3-CL; VL3-VL4-VH4-VH3-CH1-CL; VH3-VH4-VL4-VL3-CH1-CL; VL3-VL4-VH4-VH3-CL-CH1; VH3-VH4-VL4-VL3-CL-CH1; VL3-VL4-VH4-VH3-CH1-Fc; VH3-VH4-VL4-VL3-CH1-Fc; VL3-VL4-VH4-VH3-CL-Fc; VH3-VH4-VL4-VL3-CL-Fc; VL3-VL4-VH4-VH3-CH1-CL-Fc; VH3-VH4-VL4-VL3-CH1-CL-Fc; VL3-VL4-VH4-VH3-CL-CH1-Fc; VH3-VH4-VL4-VL3-CL-CH1-Fc; VL3-L6-VL4-L7-VH4-L8-VH3; VH3-L6-VH4-L7-VL4-L8-VL3; VL3-L6-VL4-L7-VH4-L8-VH3-Fc; VH3-L6-VH4-L7-VL4- L8-VL3-Fe; VL3-L6-VL4-L7-VH4-L8-VH3-L9-Fc; VH3-L6-VH4-L7-VL4-L8-VL3-L9-Fc; VL3-L6-VL4-L7-VH4-L8-VH3-L9-CH1; VH3-L6-VH4-L7-VL4-L8-VL3-L9-CH1; VL3-L6-VL4-L7-VH4-L8-VH3-L9-CL; VH3-L6-VH4- L7-VL4-L8-VL3-L9-CL; VL3-L6-VL4-L7-VH4-L8-VH3-L9-CH1-L10-CL; VH3-L6-VH4-L7-VL4-L8-VL3-L9-CH1- L10-CL; VL3-L6-VL4-L7-VH4-L8-VH3-L9-CL-L10-CH1; VH3-L6-VH4-L7-VL4-L8-VL3-L9-CL-L10-CH1; VL3-L6-VL4-L7-VH4-L8-VH3-L9-CH1-Fc; VH3-L6-VH4-L7-VL4-L8-VL3-L9-CH1-Fc; VL3-L6-VL4-L7-VH4-L8-VH3- L9-CL-Fc; VH3-L6-VH4-L7-VL4-L8-VL3-L9-CL-Fc; VL3-L6-VL4-L7-VH4-L8-VH3-L9-CH1-L10-CL-Fc; VH3-L6-VH4-L7-VL4-L8-VL3-L9-CH1-L10-CL-Fc; VL3-L6-VL4-L7-VH4-L8-VH3-L9-CL-L10-CH1-Fc; VH3-L6-VH4-L7-VL4-L8-VL3-L9-CL-L10-CH1-Fc; VL3-L6-VL4-L7-VH4-L8-VH3-L9-CH1-L10-Fc; VH3-L6-VH4-L7-VL4-L8-VL3-L9-CH1-L10-Fc; VL3-L6-VL4-L7-VH4-L8-VH3-L9-CL-L10-Fc; VH3-L6-VH4-L7-VL4-L8-VL3-L9-CL-L10-Fc; VL3-L6-VL4-L7-VH4-L8-VH3-L9-CH1-L10-CL-L11-Fc; VH3-L6-VH4-L7-VL4-L8-VL3-L9-CH1-L10-CL-L11-Fc; VL3-L6-VL4-L7-VH4-L8-VH3-L9-CL-L10-CH1-L11-Fc; or VH3-L6-VH4-L7-VL4-L8-VL3-L9-CL-L10-CH1-L11-Fc. In some aspects, the first polypeptide has a structure represented by VL1-VL2-VH2-VH1-Fc, and the second polypeptide has a structure represented by VL3-VL4-VH4-VH3; VH3-VH4-VL4-VL3; VL3-VL4-VH4-VH3-Fc; VH3-VH4-VL4-VL3-Fc; VL3-VL4-VH4-VH3-CH1; VH3-VH4-VL4-VL3-CH1; VL3-VL4-VH4-VH3-CL; VH3-VH4-VL4-VL3-CL; VL3-VL4-VH4-VH3-CH1-CL; VH3-VH4-VL4-VL3-CH1-CL; VL3-VL4-VH4-VH3-CL-CH1; VH3-VH4-VL4-VL3-CL-CH1; VL3-VL4-VH4-VH3-CH1-Fc; VH3-VH4-VL4-VL3-CH1-Fc; VL3-VL4-VH4-VH3-CL-Fc; VH3-VH4-VL4-VL3-CL-Fc; VL3-VL4-VH4-VH3-CH1-CL-Fc; VH3-VH4-VL4-VL3-CH1-CL-Fc; VL3-VL4-VH4-VH3-CL-CH1-Fc; VH3-VH4-VL4-VL3-CL-CH1-Fc; VL3-L6-VL4-L7-VH4-L8-VH3; VH3-L6-VH4-L7-VL4-L8-VL3; VL3-L6-VL4-L7-VH4-L8-VH3-Fc; VH3-L6-VH4-L7-VL4-L8-VL3-Fc; VL3-L6-VL4-L7-VH4-L8-VH3-L9-Fc; VH3-L6-VH4-L7-VL4-L8-VL3-L9-Fc; VL3-L6-VL4-L7-VH4-L8-VH3-L9-CH1; VH3-L6-VH4-L7-VL4-L8-VL3-L9-CH1; VL3-L6-VL4-L7-VH4-L8-VH3-L9-CL; VH3-L6-VH4-L7-VL4-L8-VL3-L9-CL; VL3-L6-VL4-L7-VH4-L8-VH3- L9-CH1-L10-CL; VH3-L6-VH4-L7-VL4-L8-VL3-L9-CH1-L10-CL; VL3-L6-VL4-L7-VH4-L8-VH3-L9-CL-L10-CH1; VH3-L6-VH4-L7-VL4-L8-VL3-L9-CL-L10-CH1; VL3-L6-VL4-L7-VH4-L8-VH3-L9-CH1-Fc; VH3-L6-VH4-L7-VL4-L8-VL3-L9-CH1-Fc; VL3-L6-VL4-L7-VH4-L8-VH3-L9-CL-Fc; VH3-L6-VH4-L7-VL4-L8-VL3-L9-CL-Fc; VL3-L6-VL4-L7-VH4-L8-VH3-L9-CH1-L10-CL-Fc; VH3-L6-VH4-L7-VL4-L8-VL3-L9-CH1-L10-CL-Fc; VL3-L6-VL4-L7-VH4-L8-VH3-L9-CL-L10-CH1-Fc; VH3-L6-VH4-L7-VL4-L8-VL3-L9-CL-L10-CH1-Fc; VL3-L6-VL4-L7-VH4-L8-VH3-L9-CH1-L10-Fc; VH3-L6-VH4-L7-VL4-L8-VL3-L9-CH1-L10-Fc; VL3-L6-VL4-L7-VH4-L8-VH3-L9-CL-L10-Fc; VH3-L6-VH4-L7-VL4-L8-VL3-L9-CL-L10-Fc; VL3-L6-VL4-L7-VH4-L8-VH3-L9-CH1-L10-CL-L11-Fc; VH3-L6-VH4-L7-VL4-L8-VL3-L9-CH1-L10-CL-L11-Fc; VL3-L6-VL4-L7-VH4-L8-VH3-L9-CL-L10-CH1-L11-Fc; or VH3-L6-VH4-L7-VL4-L8-VL3-L9-CL-L10-CH1-L11-Fc. In some aspects, the first polypeptide has a structure represented by VH1-VH2-VL2-VL1-Fc, and the second polypeptide has a structure represented by VL3-VL4-VH4-VH3; VH3-VH4-VL4-VL3; VL3-VL4-VH4-VH3-Fc; VH3-VH4-VL4-VL3-Fc; VL3-VL4-VH4-VH3-CH1; VH3-VH4-VL4-VL3-CH1; VL3-VL4-VH4-VH3-CL; VH3-VH4-VL4-VL3-CL; VL3-VL4-VH4-VH3-CH1-CL; VH3-VH4-VL4-VL3-CH1-CL; VL3-VL4-VH4-VH3-CL-CH1; VH3-VH4-VL4-VL3-CL-CH1; VL3-VL4-VH4-VH3-CH1-Fc; VH3-VH4-VL4-VL3-CH1-Fc; VL3-VL4-VH4-VH3-CL-Fc; VH3-VH4-VL4-VL3-CL-Fc; VL3-VL4-VH4-VH3-CH1-CL-Fc; VH3-VH4-VL4-VL3-CH1-CL-Fc; VL3-VL4-VH4-VH3-CL-CH1-Fc; VH3-VH4-VL4-VL3-CL-CH1-Fc; VL3-L6-VL4-L7-VH4-L8-VH3; VH3-L6-VH4-L7-VL4-L8-VL3; VL3-L6-VL4-L7-VH4-L8-VH3-Fc; VH3-L6-VH4-L7-VL4- L8-VL3-Fe; VL3-L6-VL4-L7-VH4-L8-VH3-L9-Fc; VH3-L6-VH4-L7-VL4-L8-VL3-L9-Fc; VL3-L6-VL4-L7-VH4-L8-VH3-L9-CH1; VH3-L6-VH4-L7-VL4-L8-VL3-L9-CH1; VL3-L6-VL4-L7-VH4-L8-VH3-L9-CL; VH3-L6-VH4- L7-VL4-L8-VL3-L9-CL; VL3-L6-VL4-L7-VH4-L8-VH3-L9-CH1-L10-CL; VH3-L6-VH4-L7-VL4-L8-VL3-L9-CH1- L10-CL; VL3-L6-VL4-L7-VH4-L8-VH3-L9-CL-L10-CH1; VH3-L6-VH4-L7-VL4-L8-VL3-L9-CL-L10-CH1; VL3-L6-VL4-L7-VH4-L8-VH3-L9-CH1-Fc; VH3-L6-VH4-L7-VL4-L8-VL3-L9-CH1-Fc; VL3-L6-VL4-L7-VH4-L8-VH3- L9-CL-Fc; VH3-L6-VH4-L7-VL4-L8-VL3-L9-CL-Fc; VL3-L6-VL4-L7-VH4-L8-VH3-L9-CH1-L10-CL-Fc; VH3-L6-VH4-L7-VL4-L8-VL3-L9-CH1-L10-CL-Fc; VL3-L6-VL4-L7-VH4-L8-VH3-L9-CL-L10-CH1-Fc; VH3-L6-VH4-L7-VL4-L8-VL3-L9-CL-L10-CH1-Fc; VL3-L6-VL4-L7-VH4-L8-VH3-L9-CH1-L10-Fc; VH3-L6-VH4-L7-VL4-L8-VL3-L9-CH1-L10-Fc; VL3-L6-VL4-L7-VH4-L8-VH3-L9-CL-L10-Fc; VH3-L6-VH4-L7-VL4-L8-VL3-L9-CL-L10-Fc; VL3-L6-VL4-L7-VH4-L8-VH3-L9-CH1-L10-CL-L11-Fc; VH3-L6-VH4-L7-VL4-L8-VL3-L9-CH1-L10-CL-L11-Fc; VL3-L6-VL4-L7-VH4-L8-VH3-L9-CL-L10-CH1-L11-Fc; or VH3-L6-VH4-L7-VL4-L8-VL3-L9-CL-L10-CH1-L11-Fc. In some aspects, the first polypeptide has a structure represented by VL1-VL2-VH2-VH1-CH1, and the second polypeptide has a structure represented by VL3-VL4-VH4-VH3; VH3-VH4-VL4-VL3; VL3-VL4-VH4-VH3-Fc; VH3-VH4-VL4-VL3-Fc; VL3-VL4-VH4-VH3-CH1; VH3-VH4-VL4-VL3-CH1; VL3-VL4-VH4-VH3-CL; VH3-VH4-VL4-VL3-CL; VL3-VL4-VH4-VH3-CH1-CL; VH3-VH4-VL4-VL3-CH1-CL; VL3-VL4-VH4-VH3-CL-CH1; VH3-VH4-VL4-VL3-CL-CH1; VL3-VL4-VH4-VH3-CH1-Fc; VH3-VH4-VL4-VL3-CH1-Fc; VL3-VL4-VH4-VH3-CL-Fc; VH3-VH4-VL4-VL3-CL-Fc; VL3-VL4-VH4-VH3-CH1-CL-Fc; VH3-VH4-VL4-VL3-CH1-CL-Fc; VL3-VL4-VH4-VH3-CL-CH1-Fc; VH3-VH4-VL4-VL3-CL-CH1-Fc; VL3-L6-VL4-L7-VH4-L8-VH3; VH3-L6-VH4-L7-VL4-L8-VL3; VL3-L6-VL4-L7-VH4-L8-VH3-Fc; VH3-L6-VH4-L7-VL4-L8-VL3-Fc; VL3-L6-VL4-L7-VH4-L8-VH3-L9-Fc; VH3-L6-VH4-L7-VL4-L8-VL3-L9-Fc; VL3-L6-VL4-L7-VH4-L8-VH3-L9-CH1; VH3-L6-VH4-L7-VL4-L8-VL3-L9-CH1; VL3-L6-VL4-L7-VH4-L8-VH3-L9-CL; VH3-L6-VH4-L7-VL4-L8-VL3-L9-CL; VL3-L6-VL4-L7-VH4-L8-VH3- L9-CH1-L10-CL; VH3-L6-VH4-L7-VL4-L8-VL3-L9-CH1-L10-CL; VL3-L6-VL4-L7-VH4-L8-VH3-L9-CL-L10-CH1; VH3-L6-VH4-L7-VL4-L8-VL3-L9-CL-L10-CH1; VL3-L6-VL4-L7-VH4-L8-VH3-L9-CH1-Fc; VH3-L6-VH4-L7-VL4-L8-VL3-L9-CH1-Fc; VL3-L6-VL4-L7-VH4-L8-VH3-L9-CL-Fc; VH3-L6-VH4-L7-VL4-L8-VL3-L9-CL-Fc; VL3-L6-VL4-L7-VH4-L8-VH3-L9-CH1-L10-CL-Fc; VH3-L6-VH4-L7-VL4-L8-VL3-L9-CH1-L10-CL-Fc; VL3-L6-VL4-L7-VH4-L8-VH3-L9-CL-L10-CH1-Fc; VH3-L6-VH4-L7-VL4-L8-VL3-L9-CL-L10-CH1-Fc; VL3-L6-VL4-L7-VH4-L8-VH3-L9-CH1-L10-Fc; VH3-L6-VH4-L7-VL4-L8-VL3-L9-CH1-L10-Fc; VL3-L6-VL4-L7-VH4-L8-VH3-L9-CL-L10-Fc; VH3-L6-VH4-L7-VL4-L8-VL3-L9-CL-L10-Fc; VL3-L6-VL4-L7-VH4-L8-VH3-L9-CH1-L10-CL-L11-Fc; VH3-L6-VH4-L7-VL4-L8-VL3-L9-CH1-L10-CL-L11-Fc; VL3-L6-VL4-L7-VH4-L8-VH3-L9-CL-L10-CH1-L11-Fc; or VH3-L6-VH4-L7-VL4-L8-VL3-L9-CL-L10-CH1-L11-Fc. In some aspects, the first polypeptide has a structure represented by VH1-VH2-VL2-VL1-CH1, and the second polypeptide has a structure represented by VL3-VL4-VH4-VH3; VH3-VH4-VL4-VL3; VL3-VL4-VH4-VH3-Fc; VH3-VH4-VL4-VL3-Fc; VL3-VL4-VH4-VH3-CH1; VH3-VH4-VL4-VL3-CH1; VL3-VL4-VH4-VH3-CL; VH3-VH4-VL4-VL3-CL; VL3-VL4-VH4-VH3-CH1-CL; VH3-VH4-VL4-VL3-CH1-CL; VL3-VL4-VH4-VH3-CL-CH1; VH3-VH4-VL4-VL3-CL-CH1; VL3-VL4-VH4-VH3-CH1-Fc; VH3-VH4-VL4-VL3-CH1-Fc; VL3-VL4-VH4-VH3-CL-Fc; VH3-VH4-VL4-VL3-CL-Fc; VL3-VL4-VH4-VH3-CH1-CL-Fc; VH3-VH4-VL4-VL3-CH1-CL-Fc; VL3-VL4-VH4-VH3-CL-CH1-Fc; VH3-VH4-VL4-VL3-CL-CH1-Fc; VL3-L6-VL4-L7-VH4-L8-VH3; VH3-L6-VH4-L7-VL4-L8-VL3; VL3-L6-VL4-L7-VH4-L8-VH3-Fc; VH3-L6-VH4-L7-VL4- L8-VL3-Fe; VL3-L6-VL4-L7-VH4-L8-VH3-L9-Fc; VH3-L6-VH4-L7-VL4-L8-VL3-L9-Fc; VL3-L6-VL4-L7-VH4-L8-VH3-L9-CH1; VH3-L6-VH4-L7-VL4-L8-VL3-L9-CH1; VL3-L6-VL4-L7-VH4-L8-VH3-L9-CL; VH3-L6-VH4- L7-VL4-L8-VL3-L9-CL; VL3-L6-VL4-L7-VH4-L8-VH3-L9-CH1-L10-CL; VH3-L6-VH4-L7-VL4-L8-VL3-L9-CH1- L10-CL; VL3-L6-VL4-L7-VH4-L8-VH3-L9-CL-L10-CH1; VH3-L6-VH4-L7-VL4-L8-VL3-L9-CL-L10-CH1; VL3-L6-VL4-L7-VH4-L8-VH3-L9-CH1-Fc; VH3-L6-VH4-L7-VL4-L8-VL3-L9-CH1-Fc; VL3-L6-VL4-L7-VH4-L8-VH3- L9-CL-Fc; VH3-L6-VH4-L7-VL4-L8-VL3-L9-CL-Fc; VL3-L6-VL4-L7-VH4-L8-VH3-L9-CH1-L10-CL-Fc; VH3-L6-VH4-L7-VL4-L8-VL3-L9-CH1-L10-CL-Fc; VL3-L6-VL4-L7-VH4-L8-VH3-L9-CL-L10-CH1-Fc; VH3-L6-VH4-L7-VL4-L8-VL3-L9-CL-L10-CH1-Fc; VL3-L6-VL4-L7-VH4-L8-VH3-L9-CH1-L10-Fc; VH3-L6-VH4-L7-VL4-L8-VL3-L9-CH1-L10-Fc; VL3-L6-VL4-L7-VH4-L8-VH3-L9-CL-L10-Fc; VH3-L6-VH4-L7-VL4-L8-VL3-L9-CL-L10-Fc; VL3-L6-VL4-L7-VH4-L8-VH3-L9-CH1-L10-CL-L11-Fc; VH3-L6-VH4-L7-VL4-L8-VL3-L9-CH1-L10-CL-L11-Fc; VL3-L6-VL4-L7-VH4-L8-VH3-L9-CL-L10-CH1-L11-Fc; or VH3-L6-VH4-L7-VL4-L8-VL3-L9-CL-L10-CH1-L11-Fc. In some aspects, the first polypeptide has a structure represented by VL1-VL2-VH2-VH1-CL, and the second polypeptide has a structure represented by VL3-VL4-VH4-VH3; VH3-VH4-VL4-VL3; VL3-VL4-VH4-VH3-Fc; VH3-VH4-VL4-VL3-Fc; VL3-VL4-VH4-VH3-CH1; VH3-VH4-VL4-VL3-CH1; VL3-VL4-VH4-VH3-CL; VH3-VH4-VL4-VL3-CL; VL3-VL4-VH4-VH3-CH1-CL; VH3-VH4-VL4-VL3-CH1-CL; VL3-VL4-VH4-VH3-CL-CH1; VH3-VH4-VL4-VL3-CL-CH1; VL3-VL4-VH4-VH3-CH1-Fc; VH3-VH4-VL4-VL3-CH1-Fc; VL3-VL4-VH4-VH3-CL-Fc; VH3-VH4-VL4-VL3-CL-Fc; VL3-VL4-VH4-VH3-CH1-CL-Fc; VH3-VH4-VL4-VL3-CH1-CL-Fc; VL3-VL4-VH4-VH3-CL-CH1-Fc; VH3-VH4-VL4-VL3-CL-CH1-Fc; VL3-L6-VL4-L7-VH4-L8-VH3; VH3-L6-VH4-L7-VL4-L8-VL3; VL3-L6-VL4-L7-VH4-L8-VH3-Fc; VH3-L6-VH4-L7-VL4-L8-VL3-Fc; VL3-L6-VL4-L7-VH4-L8-VH3-L9-Fc; VH3-L6-VH4-L7-VL4-L8-VL3-L9-Fc; VL3-L6-VL4-L7-VH4-L8-VH3-L9-CH1; VH3-L6-VH4-L7-VL4-L8-VL3-L9-CH1; VL3-L6-VL4-L7-VH4-L8-VH3-L9-CL; VH3-L6-VH4-L7-VL4-L8-VL3-L9-CL; VL3-L6-VL4-L7-VH4-L8-VH3- L9-CH1-L10-CL; VH3-L6-VH4-L7-VL4-L8-VL3-L9-CH1-L10-CL; VL3-L6-VL4-L7-VH4-L8-VH3-L9-CL-L10-CH1; VH3-L6-VH4-L7-VL4-L8-VL3-L9-CL-L10-CH1; VL3-L6-VL4-L7-VH4-L8-VH3-L9-CH1-Fc; VH3-L6-VH4-L7-VL4-L8-VL3-L9-CH1-Fc; VL3-L6-VL4-L7-VH4-L8-VH3-L9-CL-Fc; VH3-L6-VH4-L7-VL4-L8-VL3-L9-CL-Fc; VL3-L6-VL4-L7-VH4-L8-VH3-L9-CH1-L10-CL-Fc; VH3-L6-VH4-L7-VL4-L8-VL3-L9-CH1-L10-CL-Fc; VL3-L6-VL4-L7-VH4-L8-VH3-L9-CL-L10-CH1-Fc; VH3-L6-VH4-L7-VL4-L8-VL3-L9-CL-L10-CH1-Fc; VL3-L6-VL4-L7-VH4-L8-VH3-L9-CH1-L10-Fc; VH3-L6-VH4-L7-VL4-L8-VL3-L9-CH1-L10-Fc; VL3-L6-VL4-L7-VH4-L8-VH3-L9-CL-L10-Fc; VH3-L6-VH4-L7-VL4-L8-VL3-L9-CL-L10-Fc; VL3-L6-VL4-L7-VH4-L8-VH3-L9-CH1-L10-CL-L11-Fc; VH3-L6-VH4-L7-VL4-L8-VL3-L9-CH1-L10-CL-L11-Fc; VL3-L6-VL4-L7-VH4-L8-VH3-L9-CL-L10-CH1-L11-Fc; or VH3-L6-VH4-L7-VL4-L8-VL3-L9-CL-L10-CH1-L11-Fc. In some aspects, the first polypeptide has a structure represented by VH1-VH2-VL2-VL1-CL, and the second polypeptide has a structure represented by VL3-VL4-VH4-VH3; VH3-VH4-VL4-VL3; VL3-VL4-VH4-VH3-Fc; VH3-VH4-VL4-VL3-Fc; VL3-VL4-VH4-VH3-CH1; VH3-VH4-VL4-VL3-CH1; VL3-VL4-VH4-VH3-CL; VH3-VH4-VL4-VL3-CL; VL3-VL4-VH4-VH3-CH1-CL; VH3-VH4-VL4-VL3-CH1-CL; VL3-VL4-VH4-VH3-CL-CH1; VH3-VH4-VL4-VL3-CL-CH1; VL3-VL4-VH4-VH3-CH1-Fc; VH3-VH4-VL4-VL3-CH1-Fc; VL3-VL4-VH4-VH3-CL-Fc; VH3-VH4-VL4-VL3-CL-Fc; VL3-VL4-VH4-VH3-CH1-CL-Fc; VH3-VH4-VL4-VL3-CH1-CL-Fc; VL3-VL4-VH4-VH3-CL-CH1-Fc; VH3-VH4-VL4-VL3-CL-CH1-Fc; VL3-L6-VL4-L7-VH4-L8-VH3; VH3-L6-VH4-L7-VL4-L8-VL3; VL3-L6-VL4-L7-VH4-L8-VH3-Fc; VH3-L6-VH4-L7-VL4- L8-VL3-Fe; VL3-L6-VL4-L7-VH4-L8-VH3-L9-Fc; VH3-L6-VH4-L7-VL4-L8-VL3-L9-Fc; VL3-L6-VL4-L7-VH4-L8-VH3-L9-CH1; VH3-L6-VH4-L7-VL4-L8-VL3-L9-CH1; VL3-L6-VL4-L7-VH4-L8-VH3-L9-CL; VH3-L6-VH4- L7-VL4-L8-VL3-L9-CL; VL3-L6-VL4-L7-VH4-L8-VH3-L9-CH1-L10-CL; VH3-L6-VH4-L7-VL4-L8-VL3-L9-CH1- L10-CL; VL3-L6-VL4-L7-VH4-L8-VH3-L9-CL-L10-CH1; VH3-L6-VH4-L7-VL4-L8-VL3-L9-CL-L10-CH1; VL3-L6-VL4-L7-VH4-L8-VH3-L9-CH1-Fc; VH3-L6-VH4-L7-VL4-L8-VL3-L9-CH1-Fc; VL3-L6-VL4-L7-VH4-L8-VH3- L9-CL-Fc; VH3-L6-VH4-L7-VL4-L8-VL3-L9-CL-Fc; VL3-L6-VL4-L7-VH4-L8-VH3-L9-CH1-L10-CL-Fc; VH3-L6-VH4-L7-VL4-L8-VL3-L9-CH1-L10-CL-Fc; VL3-L6-VL4-L7-VH4-L8-VH3-L9-CL-L10-CH1-Fc; VH3-L6-VH4-L7-VL4-L8-VL3-L9-CL-L10-CH1-Fc; VL3-L6-VL4-L7-VH4-L8-VH3-L9-CH1-L10-Fc; VH3-L6-VH4-L7-VL4-L8-VL3-L9-CH1-L10-Fc; VL3-L6-VL4-L7-VH4-L8-VH3-L9-CL-L10-Fc; VH3-L6-VH4-L7-VL4-L8-VL3-L9-CL-L10-Fc; VL3-L6-VL4-L7-VH4-L8-VH3-L9-CH1-L10-CL-L11-Fc; VH3-L6-VH4-L7-VL4-L8-VL3-L9-CH1-L10-CL-L11-Fc; VL3-L6-VL4-L7-VH4-L8-VH3-L9-CL-L10-CH1-L11-Fc; or VH3-L6-VH4-L7-VL4-L8-VL3-L9-CL-L10-CH1-L11-Fc. In some aspects, the first polypeptide has a structure represented by VL1-VL2-VH2-VH1-CH1-CL, and the second polypeptide has a structure represented by VL3-VL4-VH4-VH3; VH3-VH4-VL4-VL3; VL3-VL4-VH4-VH3-Fc; VH3-VH4-VL4-VL3-Fc; VL3-VL4-VH4-VH3-CH1; VH3-VH4-VL4-VL3-CH1; VL3-VL4-VH4-VH3-CL; VH3-VH4-VL4-VL3-CL; VL3-VL4-VH4-VH3-CH1-CL; VH3-VH4-VL4-VL3-CH1-CL; VL3-VL4-VH4-VH3-CL-CH1; VH3-VH4-VL4-VL3-CL-CH1; VL3-VL4-VH4-VH3-CH1-Fc; VH3-VH4-VL4-VL3-CH1-Fc; VL3-VL4-VH4-VH3-CL-Fc; VH3-VH4-VL4-VL3-CL-Fc; VL3-VL4-VH4-VH3-CH1-CL-Fc; VH3-VH4-VL4-VL3-CH1-CL-Fc; VL3-VL4-VH4-VH3-CL-CH1-Fc; VH3-VH4-VL4-VL3-CL-CH1-Fc; VL3-L6-VL4-L7-VH4-L8-VH3; VH3-L6-VH4-L7-VL4-L8-VL3; VL3-L6-VL4-L7-VH4-L8-VH3-Fc; VH3-L6-VH4-L7-VL4-L8-VL3-Fc; VL3-L6-VL4-L7-VH4-L8-VH3-L9-Fc; VH3-L6-VH4-L7-VL4-L8-VL3-L9-Fc; VL3-L6-VL4-L7-VH4-L8-VH3-L9-CH1; VH3-L6-VH4-L7-VL4-L8-VL3-L9-CH1; VL3-L6-VL4-L7-VH4-L8-VH3-L9-CL; VH3-L6-VH4-L7-VL4-L8-VL3-L9-CL; VL3-L6-VL4-L7-VH4-L8-VH3- L9-CH1-L10-CL; VH3-L6-VH4-L7-VL4-L8-VL3-L9-CH1-L10-CL; VL3-L6-VL4-L7-VH4-L8-VH3-L9-CL-L10-CH1; VH3-L6-VH4-L7-VL4-L8-VL3-L9-CL-L10-CH1; VL3-L6-VL4-L7-VH4-L8-VH3-L9-CH1-Fc; VH3-L6-VH4-L7-VL4-L8-VL3-L9-CH1-Fc; VL3-L6-VL4-L7-VH4-L8-VH3-L9-CL-Fc; VH3-L6-VH4-L7-VL4-L8-VL3-L9-CL-Fc; VL3-L6-VL4-L7-VH4-L8-VH3-L9-CH1-L10-CL-Fc; VH3-L6-VH4-L7-VL4-L8-VL3-L9-CH1-L10-CL-Fc; VL3-L6-VL4-L7-VH4-L8-VH3-L9-CL-L10-CH1-Fc; VH3-L6-VH4-L7-VL4-L8-VL3-L9-CL-L10-CH1-Fc; VL3-L6-VL4-L7-VH4-L8-VH3-L9-CH1-L10-Fc; VH3-L6-VH4-L7-VL4-L8-VL3-L9-CH1-L10-Fc; VL3-L6-VL4-L7-VH4-L8-VH3-L9-CL-L10-Fc; VH3-L6-VH4-L7-VL4-L8-VL3-L9-CL-L10-Fc; VL3-L6-VL4-L7-VH4-L8-VH3-L9-CH1-L10-CL-L11-Fc; VH3-L6-VH4-L7-VL4-L8-VL3-L9-CH1-L10-CL-L11-Fc; VL3-L6-VL4-L7-VH4-L8-VH3-L9-CL-L10-CH1-L11-Fc; or VH3-L6-VH4-L7-VL4-L8-VL3-L9-CL-L10-CH1-L11-Fc. In some aspects, the first polypeptide has a structure represented by VH1-VH2-VL2-VL1-CH1-CL, and the second polypeptide has a structure represented by VL3-VL4-VH4-VH3; VH3-VH4-VL4-VL3; VL3-VL4-VH4-VH3-Fc; VH3-VH4-VL4-VL3-Fc; VL3-VL4-VH4-VH3-CH1; VH3-VH4-VL4-VL3-CH1; VL3-VL4-VH4-VH3-CL; VH3-VH4-VL4-VL3-CL; VL3-VL4-VH4-VH3-CH1-CL; VH3-VH4-VL4-VL3-CH1-CL; VL3-VL4-VH4-VH3-CL-CH1; VH3-VH4-VL4-VL3-CL-CH1; VL3-VL4-VH4-VH3-CH1-Fc; VH3-VH4-VL4-VL3-CH1-Fc; VL3-VL4-VH4-VH3-CL-Fc; VH3-VH4-VL4-VL3-CL-Fc; VL3-VL4-VH4-VH3-CH1-CL-Fc; VH3-VH4-VL4-VL3-CH1-CL-Fc; VL3-VL4-VH4-VH3-CL-CH1-Fc; VH3-VH4-VL4-VL3-CL-CH1-Fc; VL3-L6-VL4-L7-VH4-L8-VH3; VH3-L6-VH4-L7-VL4-L8-VL3; VL3-L6-VL4-L7-VH4-L8-VH3-Fc; VH3-L6-VH4- L7-VL4-L8-VL3-Fc; VL3-L6-VL4-L7-VH4-L8-VH3-L9-Fc; VH3-L6-VH4-L7-VL4-L8-VL3-L9-Fc; VL3-L6-VL4-L7-VH4-L8-VH3-L9-CH1; VH3-L6-VH4-L7-VL4-L8-VL3-L9-CH1; VL3-L6-VL4-L7-VH4-L8-VH3-L9-CL; VH3- L6-VH4-L7-VL4-L8-VL3-L9-CL; VL3-L6-VL4-L7-VH4-L8-VH3-L9-CH1-L10-CL; VH3-L6-VH4-L7-VL4-L8-VL3- L9-CH1-L10-CL; VL3-L6-VL4-L7-VH4-L8-VH3-L9-CL-L10-CH1; VH3-L6-VH4-L7-VL4-L8-VL3-L9-CL-L10-CH1; VL3-L6-VL4-L7-VH4-L8-VH3-L9-CH1-Fc; VH3-L6-VH4-L7-VL4-L8-VL3-L9-CH1-Fe; VL3-L6-VL4-L7-VH4- L8-VH3-L9-CL-Fc; VH3-L6-VH4-L7-VL4-L8-VL3-L9-CL-Fc; VL3-L6-VL4-L7-VH4-L8-VH3-L9-CH1-L10-CL-Fc; VH3-L6-VH4-L7-VL4-L8-VL3-L9-CH1-L10-CL-Fc; VL3-L6-VL4-L7-VH4-L8-VH3-L9-CL-L10-CH1-Fc; VH3-L6-VH4-L7-VL4-L8-VL3-L9-CL-L10-CH1-Fe; VL3-L6-VL4-L7-VH4-L8-VH3-L9-CH1-L10-Fc; VH3-L6-VH4-L7-VL4-L8-VL3-L9-CH1-L10-Fc; VL3-L6-VL4-L7-VH4-L8-VH3-L9-CL-L10-Fc; VH3-L6-VH4-L7-VL4-L8-VL3-L9-CL-L10-Fc; VL3-L6-VL4-L7-VH4-L8-VH3-L9-CH1-L10-CL-L11-Fc; VH3-L6-VH4-L7-VL4-L8-VL3-L9-CH1-L10-CL-L11-Fc; VL3-L6-VL4-L7-VH4-L8-VH3-L9-CL-L10-CH1-L11-Fc; or VH3-L6-VH4-L7-VL4-L8-VL3-L9-CL-L10-CH1-L11-Fc. In some aspects, the first polypeptide has a structure represented by VL1-VL2-VH2-VH1-CL-CH1, and the second polypeptide has a structure represented by VL3-VL4-VH4-VH3; VH3-VH4-VL4-VL3; VL3-VL4-VH4-VH3-Fc; VH3-VH4-VL4-VL3-Fc; VL3-VL4-VH4-VH3-CH1; VH3-VH4-VL4-VL3-CH1; VL3-VL4-VH4-VH3-CL; VH3-VH4-VL4-VL3-CL; VL3-VL4-VH4-VH3-CH1-CL; VH3-VH4-VL4-VL3-CH1-CL; VL3-VL4-VH4-VH3-CL-CH1; VH3-VH4-VL4-VL3-CL-CH1; VL3-VL4-VH4-VH3-CH1-Fe; VH3-VH4-VL4-VL3-CH1-Fc; VL3-VL4-VH4-VH3-CL-Fc; VH3-VH4-VL4-VL3-CL-Fc; VL3-VL4-VH4-VH3-CH1-CL-Fc; VH3-VH4-VL4-VL3-CH1-CL-Fc; VL3-VL4-VH4-VH3-CL-CH1-Fc; VH3-VH4-VL4-VL3-CL-CH1-Fc; VL3-L6-VL4-L7-VH4-L8-VH3; VH3-L6-VH4-L7-VL4-L8-VL3; VL3-L6-VL4-L7-VH4-L8-VH3-Fc; VH3-L6-VH4-L7-VL4-L8-VL3-Fc; VL3-L6-VL4-L7-VH4-L8-VH3-L9-Fc; VH3-L6-VH4-L7-VL4-L8-VL3-L9-Fc; VL3-L6-VL4-L7-VH4-L8-VH3-L9-CH1; VH3-L6-VH4-L7- VL4-L8-VL3-L9-CH1; VL3-L6-VL4-L7-VH4-L8-VH3-L9-CL; VH3-L6-VH4-L7-VL4-L8-VL3-L9-CL; VL3-L6-VL4- L7-VH4-L8-VH3-L9-CH1-L10-CL; VH3-L6-VH4-L7-VL4-L8-VL3-L9-CH1-L10-CL; VL3-L6-VL4-L7-VH4-L8-VH3-L9-CL-L10-CH1; VH3-L6-VH4-L7-VL4-L8-VL3-L9-CL-L10-CH1; VL3-L6-VL4-L7-VH4-L8-VH3-L9-CH1-Fc; VH3-L6-VH4-L7-VL4-L8-VL3-L9-CH1-Fc; VL3-L6-VL4-L7-VH4-L8-VH3-L9-CL-Fc; VH3-L6-VH4-L7-VL4-L8-VL3-L9-CL-Fc; VL3-L6-VL4-L7-VH4-L8-VH3-L9-CH1-L10-CL-Fc; VH3-L6-VH4-L7-VL4-L8-VL3-L9-CH1-L10-CL-Fc; VL3-L6-VL4-L7-VH4-L8-VH3-L9-CL-L10-CH1-Fc; VH3-L6-VH4-L7-VL4-L8-VL3-L9-CL-L10-CH1-Fc; VL3-L6-VL4-L7-VH4-L8-VH3-L9-CH1-L10-Fc; VH3-L6-VH4-L7-VL4-L8-VL3-L9-CH1-L10-Fc; VL3-L6-VL4- L7-VH4-L8-VH3-L9-CL-L10-Fc; VH3-L6-VH4-L7-VL4-L8-VL3-L9-CL-L10-Fc; VL3-L6-VL4-L7-VH4-L8-VH3-L9-CH1-L10-CL-L11-Fc; VH3-L6-VH4-L7-VL4-L8-VL3-L9-CH1-L10-CL-L11-Fc; VL3-L6-VL4-L7-VH4-L8-VH3-L9-CL-L10-CH1-L11-Fc; or VH3-L6-VH4-L7-VL4-L8-VL3-L9-CL-L10-CH1-L11-Fc. In some aspects, the first polypeptide has a structure represented by VH1-VH2-VL2-VL1-CL-CH1, and the second polypeptide has a structure represented by VL3-VL4-VH4-VH3; VH3-VH4-VL4-VL3; VL3-VL4-VH4-VH3-Fc; VH3-VH4-VL4-VL3-Fc; VL3-VL4-VH4-VH3-CH1; VH3-VH4-VL4-VL3-CH1; VL3-VL4-VH4-VH3-CL; VH3-VH4-VL4-VL3-CL; VL3-VL4-VH4-VH3-CH1-CL; VH3-VH4-VL4-VL3-CH1-CL; VL3-VL4-VH4-VH3-CL-CH1; VH3-VH4-VL4-VL3-CL-CH1; VL3-VL4-VH4-VH3-CH1-Fc; VH3-VH4-VL4-VL3-CH1-Fc; VL3-VL4-VH4-VH3-CL-Fc; VH3-VH4-VL4-VL3-CL-Fc; VL3-VL4-VH4-VH3-CH1-CL-Fc; VH3-VH4-VL4-VL3-CH1-CL-Fc; VL3-VL4-VH4-VH3-CL-CH1-Fc; VH3-VH4-VL4-VL3-CL-CH1-Fc; VL3-L6-VL4-L7-VH4-L8-VH3; VH3-L6-VH4-L7-VL4-L8-VL3; VL3-L6-VL4-L7-VH4-L8-VH3-Fc; VH3-L6-VH4-L7-VL4-L8-VL3-Fc; VL3-L6-VL4-L7-VH4-L8-VH3-L9-Fc; VH3-L6-VH4-L7-VL4-L8-VL3-L9-Fc; VL3-L6-VL4-L7-VH4-L8-VH3-L9-CH1; VH3-L6-VH4-L7-VL4-L8-VL3-L9-CH1; VL3-L6-VL4-L7- VH4-L8-VH3-L9-CL; VH3-L6-VH4-L7-VL4-L8-VL3-L9-CL; VL3-L6-VL4-L7-VH4-L8-VH3-L9-CH1-L10-CL; VH3-L6-VH4-L7-VL4-L8-VL3-L9-CH1-L10-CL; VL3-L6-VL4-L7-VH4-L8-VH3-L9-CL-L10-CH1; VH3-L6-VH4-L7-VL4-L8-VL3-L9-CL-L10-CH1; VL3-L6-VL4-L7-VH4-L8-VH3-L9-CH1-Fc; VH3-L6-VH4-L7-VL4-L8-VL3-L9-CH1-Fc; VL3-L6-VL4-L7-VH4-L8-VH3-L9-CL-Fc; VH3-L6-VH4-L7-VL4-L8-VL3-L9-CL-Fc; VL3-L6-VL4-L7-VH4-L8-VH3-L9-CH1-L10-CL-Fc; VH3-L6-VH4-L7-VL4-L8-VL3-L9-CH1-L10-CL-Fc; VL3-L6-VL4-L7-VH4-L8-VH3-L9-CL-L10-CH1-Fc; VH3-L6-VH4-L7-VL4-L8-VL3-L9-CL-L10-CH1-Fc; VL3-L6-VL4-L7-VH4-L8-VH3-L9-CH1-L10-Fc; VH3-L6-VH4-L7-VL4-L8-VL3-L9-CH1-L10-Fc; VL3-L6-VL4-L7-VH4-L8-VH3-L9-CL-L10-Fc; VH3-L6-VH4-L7-VL4-L8-VL3-L9-CL-L10-Fc; VL3-L6-VL4-L7-VH4-L8-VH3-L9-CH1-L10-CL-L11-Fc; VH3-L6-VH4-L7-VL4-L8-VL3-L9-CH1-L10-CL-L11-Fc; VL3-L6-VL4-L7-VH4-L8-VH3-L9-CL-L10-CH1-L11-Fc; or VH3-L6-VH4-L7-VL4-L8-VL3-L9-CL-L10-CH1-L11-Fc. In some aspects, the first polypeptide has a structure represented by VL1-VL2-VH2-VH1-CH1-Fc, and the second polypeptide has a structure represented by VL3-VL4-VH4-VH3; VH3-VH4-VL4-VL3; VL3-VL4-VH4-VH3-Fc; VH3-VH4-VL4-VL3-Fc; VL3-VL4-VH4-VH3-CH1; VH3-VH4-VL4-VL3-CH1; VL3-VL4-VH4-VH3-CL; VH3-VH4-VL4-VL3-CL; VL3-VL4-VH4-VH3-CH1-CL; VH3-VH4-VL4-VL3-CH1-CL; VL3-VL4-VH4-VH3-CL-CH1; VH3-VH4-VL4-VL3-CL-CH1; VL3-VL4-VH4-VH3-CH1-Fc; VH3-VH4-VL4-VL3-CH1-Fc; VL3-VL4-VH4-VH3-CL-Fc; VH3-VH4-VL4-VL3-CL-Fc; VL3-VL4-VH4-VH3-CH1-CL-Fc; VH3-VH4-VL4-VL3-CH1-CL-Fc; VL3-VL4-VH4-VH3-CL-CH1-Fc; VH3-VH4-VL4-VL3-CL-CH1-Fc; VL3-L6-VL4-L7-VH4-L8-VH3; VH3-L6-VH4-L7-VL4-L8-VL3; VL3-L6-VL4-L7-VH4-L8-VH3-Fc; VH3-L6-VH4-L7-VL4-L8-VL3-Fc; VL3-L6-VL4-L7-VH4-L8-VH3-L9-Fe; VH3-L6-VH4-L7-VL4-L8-VL3-L9-Fc; VL3-L6-VL4-L7-VH4-L8-VH3-L9-CH1; VH3-L6-VH4-L7-VL4-L8-VL3-L9-CH1; VL3-L6-VL4-L7-VH4-L8-VH3-L9-CL; VH3-L6-VH4-L7-VL4-L8-VL3-L9-CL; VL3-L6-VL4-L7-VH4-L8-VH3-L9-CH1-L10-CL; VH3-L6-VH4-L7-VL4-L8-VL3-L9-CH1-L10-CL; VL3-L6-VL4- L7-VH4-L8-VH3-L9-CL-L10-CH1; VH3-L6-VH4-L7-VL4-L8-VL3-L9-CL-L10-CH1; VL3-L6-VL4-L7-VH4-L8-VH3-L9-CH1-Fc; VH3-L6-VH4-L7-VL4-L8-VL3-L9-CH1-Fc; VL3-L6-VL4-L7-VH4-L8-VH3-L9-CL-Fc; VH3-L6-VH4-L7-VL4-L8-VL3-L9-CL-Fc; VL3-L6-VL4-L7-VH4-L8-VH3-L9-CH1-L10-CL-Fc; VH3-L6-VH4-L7-VL4-L8-VL3-L9-CH1-L10-CL-Fc; VL3-L6-VL4-L7-VH4-L8-VH3-L9-CL-L10-CH1-Fc; VH3-L6-VH4-L7-VL4-L8-VL3-L9-CL-L10-CH1-Fc; VL3-L6-VL4-L7-VH4-L8-VH3-L9-CH1-L10-Fc; VH3-L6-VH4-L7-VL4-L8-VL3-L9-CH1-L10-Fc; VL3-L6-VL4-L7-VH4-L8-VH3-L9-CL-L10-Fc; VH3-L6-VH4-L7-VL4-L8-VL3-L9-CL-L10-Fc; VL3-L6-VL4-L7-VH4-L8-VH3-L9-CH1-L10-CL-L11-Fc; VH3-L6-VH4-L7-VL4-L8-VL3-L9-CH1-L10-CL-L11-Fc; VL3-L6-VL4-L7-VH4-L8-VH3-L9-CL-L10-CH1-L11-Fc; or VH3-L6-VH4-L7-VL4-L8-VL3-L9-CL-L10-CH1-L11-Fc. In some aspects, the first polypeptide has a structure represented by VH1-VH2-VL2-VL1-CH1-Fc, and the second polypeptide has a structure represented by VL3-VL4-VH4-VH3; VH3-VH4-VL4-VL3; VL3-VL4-VH4-VH3-Fc; VH3-VH4-VL4-VL3-Fc; VL3-VL4-VH4-VH3-CH1; VH3-VH4-VL4-VL3-CH1; VL3-VL4-VH4-VH3-CL; VH3-VH4-VL4-VL3-CL; VL3-VL4-VH4-VH3-CH1-CL; VH3-VH4-VL4-VL3-CH1-CL; VL3-VL4-VH4-VH3-CL-CH1; VH3-VH4-VL4-VL3-CL-CH1; VL3-VL4-VH4-VH3-CH1-Fc; VH3-VH4-VL4-VL3-CH1-Fc; VL3-VL4-VH4-VH3-CL-Fc; VH3-VH4-VL4-VL3-CL-Fc; VL3-VL4-VH4-VH3-CH1-CL-Fc; VH3-VH4-VL4-VL3-CH1-CL-Fc; VL3-VL4-VH4-VH3-CL-CH1-Fc; VH3-VH4-VL4-VL3-CL-CH1-Fc; VL3-L6-VL4-L7-VH4-L8-VH3; VH3-L6-VH4-L7-VL4-L8-VL3; VL3-L6-VL4-L7-VH4-L8-VH3-Fc; VH3-L6-VH4-L7-VL4-L8-VL3-Fc; VL3-L6-VL4-L7-VH4-L8-VH3-L9-Fc; VH3-L6-VH4-L7-VL4-L8-VL3-L9-Fc; VL3-L6-VL4-L7-VH4-L8-VH3-L9-CH1; VH3-L6-VH4-L7-VL4-L8-VL3-L9-CH1; VL3-L6-VL4-L7- VH4-L8-VH3-L9-CL; VH3-L6-VH4-L7-VL4-L8-VL3-L9-CL; VL3-L6-VL4-L7-VH4-L8-VH3-L9-CH1-L10-CL; VH3-L6-VH4-L7-VL4-L8-VL3-L9-CH1-L10-CL; VL3-L6-VL4-L7-VH4-L8-VH3-L9-CL-L10-CH1; VH3-L6-VH4-L7-VL4-L8-VL3-L9-CL-L10-CH1; VL3-L6-VL4-L7-VH4-L8-VH3-L9-CH1-Fc; VH3-L6-VH4-L7-VL4-L8-VL3-L9-CH1-Fc; VL3-L6-VL4-L7-VH4-L8-VH3-L9-CL-Fc; VH3-L6-VH4-L7-VL4-L8-VL3-L9-CL-Fc; VL3-L6-VL4-L7-VH4-L8-VH3-L9-CH1-L10-CL-Fc; VH3-L6-VH4-L7-VL4-L8-VL3-L9-CH1-L10-CL-Fc; VL3-L6-VL4-L7-VH4-L8-VH3-L9-CL-L10-CH1-Fc; VH3-L6-VH4-L7-VL4-L8-VL3-L9-CL-L10-CH1-Fe; VL3-L6-VL4-L7-VH4-L8-VH3-L9-CH1-L10-Fc; VH3-L6-VH4-L7-VL4-L8-VL3-L9-CH1-L10-Fc; VL3-L6-VL4-L7-VH4-L8-VH3-L9-CL-L10-Fc; VH3-L6-VH4-L7-VL4-L8-VL3-L9-CL-L10-Fc; VL3-L6-VL4-L7-VH4-L8-VH3-L9-CH1-L10-CL-L11-Fc; VH3-L6-VH4-L7-VL4-L8-VL3-L9-CH1-L10-CL-L11-Fc; VL3-L6-VL4-L7-VH4-L8-VH3-L9-CL-L10-CH1-L11-Fc; or VH3-L6-VH4-L7-VL4-L8-VL3-L9-CL-L10-CH1-L11-Fc. In some aspects, the first polypeptide has a structure represented by VL1-VL2-VH2-VH1-CL-Fc, and the second polypeptide has a structure represented by VL3-VL4-VH4-VH3; VH3-VH4-VL4-VL3; VL3-VL4-VH4-VH3-Fc; VH3-VH4-VL4-VL3-Fc; VL3-VL4-VH4-VH3-CH1; VH3-VH4-VL4-VL3-CH1; VL3-VL4-VH4-VH3-CL; VH3-VH4-VL4-VL3-CL; VL3-VL4-VH4-VH3-CH1-CL; VH3-VH4-VL4-VL3-CH1-CL; VL3-VL4-VH4-VH3-CL-CH1; VH3-VH4-VL4-VL3-CL-CH1; VL3-VL4-VH4-VH3-CH1-Fc; VH3-VH4-VL4-VL3-CH1-Fc; VL3-VL4-VH4-VH3-CL-Fc; VH3-VH4-VL4-VL3-CL-Fc; VL3-VL4-VH4-VH3-CH1-CL-Fc; VH3-VH4-VL4-VL3-CH1-CL-Fc; VL3-VL4-VH4-VH3-CL-CH1-Fc; VH3-VH4-VL4-VL3-CL-CH1-Fc; VL3-L6-VL4-L7-VH4-L8-VH3; VH3-L6-VH4-L7-VL4-L8-VL3; VL3-L6-VL4-L7-VH4-L8-VH3-Fc; VH3-L6-VH4-L7-VL4-L8-VL3-Fc; VL3-L6-VL4-L7-VH4-L8-VH3-L9-Fe; VH3-L6-VH4-L7-VL4-L8-VL3-L9-Fc; VL3-L6-VL4-L7-VH4-L8-VH3-L9-CH1; VH3-L6-VH4-L7-VL4-L8-VL3-L9-CH1; VL3-L6-VL4-L7-VH4-L8-VH3-L9-CL; VH3-L6-VH4-L7-VL4-L8-VL3-L9-CL; VL3-L6-VL4-L7-VH4-L8-VH3-L9-CH1-L10-CL; VH3-L6-VH4-L7-VL4-L8-VL3-L9-CH1-L10-CL; VL3-L6-VL4- L7-VH4-L8-VH3-L9-CL-L10-CH1; VH3-L6-VH4-L7-VL4-L8-VL3-L9-CL-L10-CH1; VL3-L6-VL4-L7-VH4-L8-VH3-L9-CH1-Fc; VH3-L6-VH4-L7-VL4-L8-VL3-L9-CH1-Fe; VL3-L6-VL4-L7-VH4-L8-VH3-L9-CL-Fc; VH3-L6-VH4-L7-VL4-L8-VL3-L9-CL-Fc; VL3-L6-VL4-L7-VH4-L8-VH3-L9-CH1-L10-CL-Fc; VH3-L6-VH4-L7-VL4-L8-VL3-L9-CH1-L10-CL-Fc; VL3-L6-VL4-L7-VH4-L8-VH3-L9-CL-L10-CH1-Fc; VH3-L6-VH4-L7-VL4-L8-VL3-L9-CL-L10-CH1-Fc; VL3-L6-VL4-L7-VH4-L8-VH3-L9-CH1-L10-Fc; VH3-L6-VH4-L7-VL4-L8-VL3-L9-CH1-L10-Fc; VL3-L6-VL4-L7-VH4-L8-VH3-L9-CL-L10-Fc; VH3-L6-VH4-L7-VL4-L8-VL3-L9-CL-L10-Fc; VL3-L6-VL4-L7-VH4-L8-VH3-L9-CH1-L10-CL-L11-Fc; VH3-L6-VH4-L7-VL4-L8-VL3-L9-CH1-L10-CL-L11-Fc; VL3-L6-VL4-L7-VH4-L8-VH3-L9-CL-L10-CH1-L11-Fc; or VH3-L6-VH4-L7-VL4-L8-VL3-L9-CL-L10-CH1-L11-Fc. In some aspects, the first polypeptide has a structure represented by VH1-VH2-VL2-VL1-CL-Fc, and the second polypeptide has a structure represented by VL3-VL4-VH4-VH3; VH3-VH4-VL4-VL3; VL3-VL4-VH4-VH3-Fc; VH3-VH4-VL4-VL3-Fc; VL3-VL4-VH4-VH3-CH1; VH3-VH4-VL4-VL3-CH1; VL3-VL4-VH4-VH3-CL; VH3-VH4-VL4-VL3-CL; VL3-VL4-VH4-VH3-CH1-CL; VH3-VH4-VL4-VL3-CH1-CL; VL3-VL4-VH4-VH3-CL-CH1; VH3-VH4-VL4-VL3-CL-CH1; VL3-VL4-VH4-VH3-CH1-Fc; VH3-VH4-VL4-VL3-CH1-Fc; VL3-VL4-VH4-VH3-CL-Fc; VH3-VH4-VL4-VL3-CL-Fc; VL3-VL4-VH4-VH3-CH1-CL-Fc; VH3-VH4-VL4-VL3-CH1-CL-Fc; VL3-VL4-VH4-VH3-CL-CH1-Fc; VH3-VH4-VL4-VL3-CL-CH1-Fc; VL3-L6-VL4-L7-VH4-L8-VH3; VH3-L6-VH4-L7-VL4-L8-VL3; VL3-L6-VL4-L7-VH4-L8-VH3-Fc; VH3-L6-VH4-L7-VL4-L8-VL3-Fc; VL3-L6-VL4-L7-VH4-L8-VH3-L9-Fc; VH3-L6-VH4-L7-VL4-L8-VL3-L9-Fc; VL3-L6-VL4-L7-VH4-L8-VH3-L9-CH1; VH3-L6-VH4-L7-VL4-L8-VL3-L9-CH1; VL3-L6-VL4-L7- VH4-L8-VH3-L9-CL; VH3-L6-VH4-L7-VL4-L8-VL3-L9-CL; VL3-L6-VL4-L7-VH4-L8-VH3-L9-CH1-L10-CL; VH3-L6-VH4-L7-VL4-L8-VL3-L9-CH1-L10-CL; VL3-L6-VL4-L7-VH4-L8-VH3-L9-CL-L10-CH1; VH3-L6-VH4-L7-VL4-L8-VL3-L9-CL-L10-CH1; VL3-L6-VL4-L7-VH4-L8-VH3-L9-CH1-Fc; VH3-L6-VH4-L7-VL4-L8-VL3-L9-CH1-Fc; VL3-L6-VL4-L7-VH4-L8-VH3-L9-CL-Fc; VH3-L6-VH4-L7-VL4-L8-VL3-L9-CL-Fc; VL3-L6-VL4-L7-VH4-L8-VH3-L9-CH1-L10-CL-Fc; VH3-L6-VH4-L7-VL4-L8-VL3-L9-CH1-L10-CL-Fc; VL3-L6-VL4-L7-VH4-L8-VH3-L9-CL-L10-CH1-Fc; VH3-L6-VH4-L7-VL4-L8-VL3-L9-CL-L10-CH1-Fe; VL3-L6-VL4-L7-VH4-L8-VH3-L9-CH1-L10-Fc; VH3-L6-VH4-L7-VL4-L8-VL3-L9-CH1-L10-Fc; VL3-L6-VL4-L7-VH4-L8-VH3-L9-CL-L10-Fc; VH3-L6-VH4-L7-VL4-L8-VL3-L9-CL-L10-Fc; VL3-L6-VL4-L7-VH4-L8-VH3-L9-CH1-L10-CL-L11-Fc; VH3-L6-VH4-L7-VL4-L8-VL3-L9-CH1-L10-CL-L11-Fc; VL3-L6-VL4-L7-VH4-L8-VH3-L9-CL-L10-CH1-L11-Fc; or VH3-L6-VH4-L7-VL4-L8-VL3-L9-CL-L10-CH1-L11-Fc. In some aspects, the first polypeptide has a structure represented by VL1-VL2-VH2-VH1-CH1-CL-Fc, and the second polypeptide has a structure represented by VL3-VL4-VH4-VH3; VH3-VH4-VL4-VL3; VL3-VL4-VH4-VH3-Fc; VH3-VH4-VL4-VL3-Fc; VL3-VL4-VH4-VH3-CH1; VH3-VH4-VL4-VL3-CH1; VL3-VL4-VH4-VH3-CL; VH3-VH4-VL4-VL3-CL; VL3-VL4-VH4-VH3-CH1-CL; VH3-VH4-VL4-VL3-CH1-CL; VL3-VL4-VH4-VH3-CL-CH1; VH3-VH4-VL4-VL3-CL-CH1; VL3-VL4-VH4-VH3-CH1-Fc; VH3-VH4-VL4-VL3-CH1-Fc; VL3-VL4-VH4-VH3-CL-Fc; VH3-VH4-VL4-VL3-CL-Fc; VL3-VL4-VH4-VH3-CH1-CL-Fc; VH3-VH4-VL4-VL3-CH1-CL-Fc; VL3-VL4-VH4-VH3-CL-CH1-Fc; VH3-VH4-VL4-VL3-CL-CH1-Fc; VL3-L6-VL4-L7-VH4-L8-VH3; VH3-L6-VH4-L7-VL4-L8-VL3; VL3-L6-VL4-L7-VH4-L8-VH3-Fc; VH3-L6-VH4-L7-VL4-L8-VL3-Fc; VL3-L6-VL4-L7-VH4-L8-VH3-L9-Fc; VH3-L6-VH4-L7-VL4-L8-VL3-L9-Fc; VL3-L6-VL4-L7-VH4-L8-VH3-L9- CH1; VH3-L6-VH4-L7-VL4-L8-VL3-L9-CH1; VL3-L6-VL4-L7-VH4-L8-VH3-L9-CL; VH3-L6-VH4-L7-VL4-L8-VL3-L9-CL; VL3-L6-VL4-L7-VH4-L8-VH3-L9-CH1-L10-CL; VH3-L6-VH4-L7-VL4-L8-VL3-L9-CH1-L10-CL; VL3-L6-VL4-L7-VH4-L8-VH3-L9-CL-L10-CH1; VH3-L6-VH4-L7-VL4-L8-VL3-L9-CL-L10-CH1; VL3-L6-VL4-L7-VH4-L8-VH3-L9-CH1-Fc; VH3-L6-VH4-L7-VL4-L8-VL3-L9-CH1-Fc; VL3-L6-VL4-L7-VH4-L8-VH3-L9-CL-Fc; VH3-L6-VH4-L7-VL4-L8-VL3-L9-CL-Fc; VL3-L6-VL4-L7-VH4-L8-VH3-L9-CH1-L10-CL-Fc; VH3-L6-VH4-L7-VL4-L8-VL3-L9-CH1-L10-CL-Fc; VL3-L6-VL4-L7-VH4-L8-VH3-L9-CL-L10-CH1-Fc; VH3-L6-VH4-L7-VL4-L8-VL3-L9-CL-L10-CH1-Fc; VL3-L6-VL4-L7-VH4-L8-VH3-L9-CH1-L10-Fc; VH3-L6-VH4-L7-VL4-L8-VL3-L9-CH1-L10-Fc; VL3-L6-VL4-L7-VH4-L8-VH3-L9-CL-L10-Fc; VH3-L6-VH4-L7-VL4-L8-VL3-L9-CL-L10-Fc; VL3-L6-VL4-L7-VH4-L8-VH3-L9-CH1-L10-CL-L11-Fc; VH3-L6-VH4-L7-VL4-L8-VL3-L9-CH1-L10-CL-L11-Fe; VL3-L6-VL4-L7-VH4-L8-VH3-L9-CL-L10-CH1-L11-Fc; or VH3-L6-VH4-L7-VL4-L8-VL3-L9-CL-L10-CH1-L11-Fc. In some aspects, the first polypeptide has a structure represented by VH1-VH2-VL2-VL1-CH1-CL-Fc, and the second polypeptide has a structure represented by VL3-VL4-VH4-VH3; VH3-VH4-VL4-VL3; VL3-VL4-VH4-VH3-Fc; VH3-VH4-VL4-VL3-Fc; VL3-VL4-VH4-VH3-CH1; VH3-VH4-VL4-VL3-CH1; VL3-VL4-VH4-VH3-CL; VH3-VH4-VL4-VL3-CL; VL3-VL4-VH4-VH3-CH1-CL; VH3-VH4-VL4-VL3-CH1-CL; VL3-VL4-VH4-VH3-CL-CH1; VH3-VH4-VL4-VL3-CL-CH1; VL3-VL4-VH4-VH3-CH1-Fc; VH3-VH4-VL4-VL3-CH1-Fc; VL3-VL4-VH4-VH3-CL-Fc; VH3-VH4-VL4-VL3-CL-Fc; VL3-VL4-VH4-VH3-CH1-CL-Fc; VH3-VH4-VL4-VL3-CH1-CL-Fc; VL3-VL4-VH4-VH3-CL-CH1-Fc; VH3-VH4-VL4-VL3-CL-CH1-Fc; VL3-L6-VL4-L7-VH4-L8-VH3; VH3-L6-VH4-L7-VL4-L8-VL3; VL3-L6-VL4-L7-VH4-L8-VH3-Fc; VH3-L6-VH4-L7-VL4-L8-VL3-Fc; VL3-L6-VL4-L7-VH4-L8-VH3-L9-Fc; VH3-L6-VH4-L7-VL4-L8-VL3-L9-Fe; VL3-L6-VL4-L7-VH4-L8-VH3-L9-CH1; VH3-L6-VH4-L7-VL4-L8-VL3-L9-CH1; VL3-L6-VL4- L7-VH4-L8-VH3-L9-CL; VH3-L6-VH4-L7-VL4-L8-VL3-L9-CL; VL3-L6-VL4-L7-VH4-L8-VH3-L9-CH1-L10-CL; VH3-L6-VH4-L7-VL4-L8-VL3-L9-CH1-L10-CL; VL3-L6-VL4-L7-VH4-L8-VH3-L9-CL-L10-CH1; VH3-L6-VH4-L7-VL4-L8-VL3-L9-CL-L10-CH1; VL3-L6-VL4-L7-VH4-L8-VH3-L9-CH1-Fc; VH3-L6-VH4-L7-VL4-L8-VL3- L9-CH1-Fc; VL3-L6-VL4-L7-VH4-L8-VH3-L9-CL-Fc; VH3-L6-VH4-L7-VL4-L8-VL3-L9-CL-Fc; VL3-L6-VL4-L7-VH4-L8-VH3-L9-CH1-L10-CL-Fc; VH3-L6-VH4-L7-VL4-L8-VL3-L9-CH1-L10-CL-Fc; VL3-L6-VL4-L7-VH4-L8-VH3-L9-CL-L10-CH1-Fc; VH3-L6-VH4-L7-VL4-L8-VL3-L9-CL-L10-CH1-Fc; VL3-L6-VL4-L7-VH4-L8-VH3-L9-CH1-L10-Fc; VH3-L6-VH4-L7-VL4-L8-VL3-L9-CH1-L10-Fc; VL3-L6-VL4-L7-VH4-L8-VH3-L9-CL-L10-Fc; VH3-L6-VH4-L7-VL4-L8-VL3-L9-CL-L10-Fc; VL3-L6-VL4-L7-VH4-L8-VH3-L9-CH1-L10-CL-L11-Fc; VH3-L6-VH4-L7-VL4-L8-VL3-L9-CH1-L10-CL-L11-Fc; VL3-L6-VL4-L7-VH4-L8-VH3-L9-CL-L10-CH1-L11-Fc; or VH3-L6-VH4-L7-VL4-L8-VL3-L9-CL-L10-CH1-L11-Fc. In some aspects, the first polypeptide has a structure represented by VL1-VL2-VH2-VH1-CL-CH1-Fc, and the second polypeptide has a structure represented by VL3-VL4-VH4-VH3; VH3-VH4-VL4-VL3; VL3-VL4-VH4-VH3-Fc; VH3-VH4-VL4-VL3-Fc; VL3-VL4-VH4-VH3-CH1; VH3-VH4-VL4-VL3-CH1; VL3-VL4-VH4-VH3-CL; VH3-VH4-VL4-VL3-CL; VL3-VL4-VH4-VH3-CH1-CL; VH3-VH4-VL4-VL3-CH1-CL; VL3-VL4-VH4-VH3-CL-CH1; VH3-VH4-VL4-VL3-CL-CH1; VL3-VL4-VH4-VH3-CH1-Fc; VH3-VH4-VL4-VL3-CH1-Fc; VL3-VL4-VH4-VH3-CL-Fc; VH3-VH4-VL4-VL3-CL-Fc; VL3-VL4-VH4-VH3-CH1-CL-Fc; VH3-VH4-VL4-VL3-CH1-CL-Fc; VL3-VL4-VH4-VH3-CL-CH1-Fc; VH3-VH4-VL4-VL3-CL-CH1-Fc; VL3-L6-VL4-L7-VH4-L8-VH3; VH3-L6-VH4-L7-VL4-L8-VL3; VL3-L6-VL4-L7-VH4-L8-VH3-Fc; VH3-L6-VH4-L7-VL4- L8-VL3-Fe; VL3-L6-VL4-L7-VH4-L8-VH3-L9-Fc; VH3-L6-VH4-L7-VL4-L8-VL3-L9-Fc; VL3-L6-VL4-L7-VH4-L8-VH3-L9-CH1; VH3-L6-VH4-L7-VL4-L8-VL3-L9-CH1; VL3-L6-VL4-L7-VH4-L8-VH3-L9-CL; VH3-L6-VH4- L7-VL4-L8-VL3-L9-CL; VL3-L6-VL4-L7-VH4-L8-VH3-L9-CH1-L10-CL; VH3-L6-VH4-L7-VL4-L8-VL3-L9-CH1- L10-CL; VL3-L6-VL4-L7-VH4-L8-VH3-L9-CL-L10-CH1; VH3-L6-VH4-L7-VL4-L8-VL3-L9-CL-L10-CH1; VL3-L6-VL4-L7-VH4-L8-VH3-L9-CH1-Fc; VH3-L6-VH4-L7-VL4-L8-VL3-L9-CH1-Fc; VL3-L6-VL4-L7-VH4-L8-VH3- L9-CL-Fc; VH3-L6-VH4-L7-VL4-L8-VL3-L9-CL-Fc; VL3-L6-VL4-L7-VH4-L8-VH3-L9-CH1-L10-CL-Fc; VH3-L6-VH4-L7-VL4-L8-VL3-L9-CH1-L10-CL-Fc; VL3-L6-VL4-L7-VH4-L8-VH3-L9-CL-L10-CH1-Fc; VH3-L6-VH4-L7-VL4-L8-VL3-L9-CL-L10-CH1-Fc; VL3-L6-VL4-L7-VH4-L8-VH3-L9-CH1-L10-Fc; VH3-L6-VH4-L7-VL4-L8-VL3-L9-CH1-L10-Fc; VL3-L6-VL4-L7-VH4-L8-VH3-L9-CL-L10-Fc; VH3-L6-VH4-L7-VL4-L8-VL3-L9-CL-L10-Fc; VL3-L6-VL4-L7-VH4-L8-VH3-L9-CH1-L10-CL-L11-Fc; VH3-L6-VH4-L7-VL4-L8-VL3-L9-CH1-L10-CL-L11-Fc; VL3-L6-VL4-L7-VH4-L8-VH3-L9-CL-L10-CH1-L11-Fc; or VH3-L6-VH4-L7-VL4-L8-VL3-L9-CL-L10-CH1-L11-Fc. In some aspects, the first polypeptide has a structure represented by VH1-VH2-VL2-VL1-CL-CH1-Fc, and the second polypeptide has a structure represented by VL3-VL4-VH4-VH3; VH3-VH4-VL4-VL3; VL3-VL4-VH4-VH3-Fc; VH3-VH4-VL4-VL3-Fc; VL3-VL4-VH4-VH3-CH1; VH3-VH4-VL4-VL3-CH1; VL3-VL4-VH4-VH3-CL; VH3-VH4-VL4-VL3-CL; VL3-VL4-VH4-VH3-CH1-CL; VH3-VH4-VL4-VL3-CH1-CL; VL3-VL4-VH4-VH3-CL-CH1; VH3-VH4-VL4-VL3-CL-CH1; VL3-VL4-VH4-VH3-CH1-Fc; VH3-VH4-VL4-VL3-CH1-Fc; VL3-VL4-VH4-VH3-CL-Fc; VH3-VH4-VL4-VL3-CL-Fc; VL3-VL4-VH4-VH3-CH1-CL-Fc; VH3-VH4-VL4-VL3-CH1-CL-Fc; VL3-VL4-VH4-VH3-CL-CH1-Fc; VH3-VH4-VL4-VL3-CL-CH1-Fc; VL3-L6-VL4-L7-VH4-L8-VH3; VH3-L6-VH4-L7-VL4-L8-VL3; VL3-L6-VL4-L7-VH4-L8-VH3-Fc; VH3-L6-VH4-L7-VL4-L8-VL3-Fc; VL3-L6-VL4-L7-VH4-L8-VH3-L9-Fc; VH3-L6-VH4-L7-VL4-L8-VL3-L9-Fc; VL3-L6-VL4-L7-VH4-L8-VH3-L9-CH1; VH3-L6-VH4-L7-VL4-L8-VL3-L9-CH1; VL3-L6-VL4-L7-VH4-L8-VH3-L9-CL; VH3-L6-VH4-L7-VL4-L8-VL3-L9-CL; VL3-L6-VL4-L7-VH4-L8-VH3- L9-CH1-L10-CL; VH3-L6-VH4-L7-VL4-L8-VL3-L9-CH1-L10-CL; VL3-L6-VL4-L7-VH4-L8-VH3-L9-CL-L10-CH1; VH3-L6-VH4-L7-VL4-L8-VL3-L9-CL-L10-CH1; VL3-L6-VL4-L7-VH4-L8-VH3-L9-CH1-Fc; VH3-L6-VH4-L7-VL4-L8-VL3-L9-CH1-Fc; VL3-L6-VL4-L7-VH4-L8-VH3-L9-CL-Fc; VH3-L6-VH4-L7-VL4-L8-VL3-L9-CL-Fc; VL3-L6-VL4-L7-VH4-L8-VH3-L9-CH1-L10-CL-Fc; VH3-L6-VH4-L7-VL4-L8-VL3-L9-CH1-L10-CL-Fc; VL3-L6-VL4-L7-VH4-L8-VH3-L9-CL-L10-CH1-Fc; VH3-L6-VH4-L7-VL4-L8-VL3-L9-CL-L10-CH1-Fc; VL3-L6-VL4-L7-VH4-L8-VH3-L9-CH1-L10-Fc; VH3-L6-VH4-L7-VL4-L8-VL3-L9-CH1-L10-Fc; VL3-L6-VL4-L7-VH4-L8-VH3-L9-CL-L10-Fc; VH3-L6-VH4-L7-VL4-L8-VL3-L9-CL-L10-Fc; VL3-L6-VL4-L7-VH4-L8-VH3-L9-CH1-L10-CL-L11-Fc; VH3-L6-VH4-L7-VL4-L8-VL3-L9-CH1-L10-CL-L11-Fc; VL3-L6-VL4-L7-VH4-L8-VH3-L9-CL-L10-CH1-L11-Fc; or VH3-L6-VH4-L7-VL4-L8-VL3-L9-CL-L10-CH1-L11-Fc. In some aspects, the first polypeptide has a structure represented by VL1-L1-VL2-L2-VH2-L3-VH1, and the second polypeptide has a structure represented by VL3-VL4-VH4-VH3; VH3-VH4-VL4-VL3; VL3-VL4-VH4-VH3-Fc; VH3-VH4-VL4-VL3-Fc; VL3-VL4-VH4-VH3-CH1; VH3-VH4-VL4-VL3-CH1; VL3-VL4-VH4-VH3-CL; VH3-VH4-VL4-VL3-CL; VL3-VL4-VH4-VH3-CH1-CL; VH3-VH4-VL4-VL3-CH1-CL; VL3-VL4-VH4-VH3-CL-CH1; VH3-VH4-VL4-VL3-CL-CH1; VL3-VL4-VH4-VH3-CH1-Fc; VH3-VH4-VL4-VL3-CH1-Fc; VL3-VL4-VH4-VH3-CL-Fc; VH3-VH4-VL4-VL3-CL-Fc; VL3-VL4-VH4-VH3-CH1-CL-Fc; VH3-VH4-VL4-VL3-CH1-CL-Fc; VL3-VL4-VH4-VH3-CL-CH1-Fc; VH3-VH4-VL4-VL3-CL-CH1-Fc; VL3-L6-VL4-L7-VH4-L8-VH3; VH3-L6-VH4-L7-VL4-L8-VL3; VL3-L6-VL4-L7-VH4-L8-VH3-Fc; VH3-L6-VH4- L7-VL4-L8-VL3-Fc; VL3-L6-VL4-L7-VH4-L8-VH3-L9-Fc; VH3-L6-VH4-L7-VL4-L8-VL3-L9-Fc; VL3-L6-VL4-L7-VH4-L8-VH3-L9-CH1; VH3-L6-VH4-L7-VL4-L8-VL3-L9-CH1; VL3-L6-VL4-L7-VH4-L8-VH3-L9-CL; VH3- L6-VH4-L7-VL4-L8-VL3-L9-CL; VL3-L6-VL4-L7-VH4-L8-VH3-L9-CH1-L10-CL; VH3-L6-VH4-L7-VL4-L8-VL3- L9-CH1-L10-CL; VL3-L6-VL4-L7-VH4-L8-VH3-L9-CL-L10-CH1; VH3-L6-VH4-L7-VL4-L8-VL3-L9-CL-L10-CH1; VL3-L6-VL4-L7-VH4-L8-VH3-L9-CH1-Fc; VH3-L6-VH4-L7-VL4-L8-VL3-L9-CH1-Fe; VL3-L6-VL4-L7-VH4- L8-VH3-L9-CL-Fc; VH3-L6-VH4-L7-VL4-L8-VL3-L9-CL-Fc; VL3-L6-VL4-L7-VH4-L8-VH3-L9-CH1-L10-CL-Fc; VH3-L6-VH4-L7-VL4-L8-VL3-L9-CH1-L10-CL-Fc; VL3-L6-VL4-L7-VH4-L8-VH3-L9-CL-L10-CH1-Fc; VH3-L6-VH4-L7-VL4-L8-VL3-L9-CL-L10-CH1-Fe; VL3-L6-VL4-L7-VH4-L8-VH3-L9-CH1-L10-Fc; VH3-L6-VH4-L7-VL4-L8-VL3-L9-CH1-L10-Fc; VL3-L6-VL4-L7-VH4-L8-VH3-L9-CL-L10-Fc; VH3-L6-VH4-L7-VL4-L8-VL3-L9-CL-L10-Fc; VL3-L6-VL4-L7-VH4-L8-VH3-L9-CH1-L10-CL-L11-Fc; VH3-L6-VH4-L7-VL4-L8-VL3-L9-CH1-L10-CL-L11-Fc; VL3-L6-VL4-L7-VH4-L8-VH3-L9-CL-L10-CH1-L11-Fc; or VH3-L6-VH4-L7-VL4-L8-VL3-L9-CL-L10-CH1-L11-Fc. In some aspects, the first polypeptide has a structure represented by VH1-L1-VH2-L2-VL2-L3-VL1, and the second polypeptide has a structure represented by VL3-VL4-VH4-VH3; VH3-VH4-VL4-VL3; VL3-VL4-VH4-VH3-Fc; VH3-VH4-VL4-VL3-Fc; VL3-VL4-VH4-VH3-CH1; VH3-VH4-VL4-VL3-CH1; VL3-VL4-VH4-VH3-CL; VH3-VH4-VL4-VL3-CL; VL3-VL4-VH4-VH3-CH1-CL; VH3-VH4-VL4-VL3-CH1-CL; VL3-VL4-VH4-VH3-CL-CH1; VH3-VH4-VL4-VL3-CL-CH1; VL3-VL4-VH4-VH3-CH1-Fe; VH3-VH4-VL4-VL3-CH1-Fc; VL3-VL4-VH4-VH3-CL-Fc; VH3-VH4-VL4-VL3-CL-Fc; VL3-VL4-VH4-VH3-CH1-CL-Fc; VH3-VH4-VL4-VL3-CH1-CL-Fc; VL3-VL4-VH4-VH3-CL-CH1-Fc; VH3-VH4-VL4-VL3-CL-CH1-Fc; VL3-L6-VL4-L7-VH4-L8-VH3; VH3-L6-VH4-L7-VL4-L8-VL3; VL3-L6-VL4-L7-VH4-L8-VH3-Fc; VH3-L6-VH4-L7-VL4-L8-VL3-Fc; VL3-L6-VL4-L7-VH4-L8-VH3-L9-Fc; VH3-L6-VH4-L7-VL4-L8-VL3-L9-Fc; VL3-L6-VL4-L7-VH4-L8-VH3-L9-CH1; VH3-L6-VH4-L7- VL4-L8-VL3-L9-CH1; VL3-L6-VL4-L7-VH4-L8-VH3-L9-CL; VH3-L6-VH4-L7-VL4-L8-VL3-L9-CL; VL3-L6-VL4- L7-VH4-L8-VH3-L9-CH1-L10-CL; VH3-L6-VH4-L7-VL4-L8-VL3-L9-CH1-L10-CL; VL3-L6-VL4-L7-VH4-L8-VH3-L9-CL-L10-CH1; VH3-L6-VH4-L7-VL4-L8-VL3-L9-CL-L10-CH1; VL3-L6-VL4-L7-VH4-L8-VH3-L9-CH1-Fc; VH3-L6-VH4-L7-VL4-L8-VL3-L9-CH1-Fc; VL3-L6-VL4-L7-VH4-L8-VH3-L9-CL-Fc; VH3-L6-VH4-L7-VL4-L8-VL3-L9-CL-Fc; VL3-L6-VL4-L7-VH4-L8-VH3-L9-CH1-L10-CL-Fc; VH3-L6-VH4-L7-VL4-L8-VL3-L9-CH1-L10-CL-Fc; VL3-L6-VL4-L7-VH4-L8-VH3-L9-CL-L10-CH1-Fc; VH3-L6-VH4-L7-VL4-L8-VL3-L9-CL-L10-CH1-Fc; VL3-L6-VL4-L7-VH4-L8-VH3-L9-CH1-L10-Fc; VH3-L6-VH4-L7-VL4-L8-VL3-L9-CH1-L10-Fc; VL3-L6-VL4- L7-VH4-L8-VH3-L9-CL-L10-Fc; VH3-L6-VH4-L7-VL4-L8-VL3-L9-CL-L10-Fc; VL3-L6-VL4-L7-VH4-L8-VH3-L9-CH1-L10-CL-L11-Fc; VH3-L6-VH4-L7-VL4-L8-VL3-L9-CH1-L10-CL-L11-Fc; VL3-L6-VL4-L7-VH4-L8-VH3-L9-CL-L10-CH1-L11-Fc; or VH3-L6-VH4-L7-VL4-L8-VL3-L9-CL-L10-CH1-L11-F c. In some aspects, the first polypeptide has a structure represented by VL1-L1-VL2-L2-VH2-L3-VH1-Fc, and the second polypeptide has a structure represented by VL3-VL4-VH4-VH3; VH3-VH4-VL4-VL3; VL3-VL4-VH4-VH3-Fc; VH3-VH4-VL4-VL3-Fc; VL3-VL4-VH4-VH3-CH1; VH3-VH4-VL4-VL3-CH1; VL3-VL4-VH4-VH3-CL; VH3-VH4-VL4-VL3-CL; VL3-VL4-VH4-VH3-CH1-CL; VH3-VH4-VL4-VL3-CH1-CL; VL3-VL4-VH4-VH3-CL-CH1; VH3-VH4-VL4-VL3-CL-CH1; VL3-VL4-VH4-VH3-CH1-Fc; VH3-VH4-VL4-VL3-CH1-Fc; VL3-VL4-VH4-VH3-CL-Fc; VH3-VH4-VL4-VL3-CL-Fc; VL3-VL4-VH4-VH3-CH1-CL-Fc; VH3-VH4-VL4-VL3-CH1-CL-Fc; VL3-VL4-VH4-VH3-CL-CH1-Fc; VH3-VH4-VL4-VL3-CL-CH1-Fc; VL3-L6-VL4-L7-VH4-L8-VH3; VH3-L6-VH4-L7-VL4-L8-VL3; VL3-L6-VL4-L7-VH4-L8-VH3-Fc; VH3-L6-VH4-L7-VL4-L8-VL3-Fc; VL3-L6-VL4-L7-VH4-L8-VH3-L9-Fc; VH3-L6-VH4-L7-VL4-L8-VL3-L9-Fe; VL3-L6-VL4-L7-VH4-L8-VH3-L9-CH1; VH3-L6-VH4-L7-VL4-L8-VL3-L9-CH1; VL3-L6-VL4- L7-VH4-L8-VH3-L9-CL; VH3-L6-VH4-L7-VL4-L8-VL3-L9-CL; VL3-L6-VL4-L7-VH4-L8-VH3-L9-CH1-L10-CL; VH3-L6-VH4-L7-VL4-L8-VL3-L9-CH1-L10-CL; VL3-L6-VL4-L7-VH4-L8-VH3-L9-CL-L10-CH1; VH3-L6-VH4-L7-VL4-L8-VL3-L9-CL-L10-CH1; VL3-L6-VL4-L7-VH4-L8-VH3-L9-CH1-Fc; VH3-L6-VH4-L7-VL4-L8-VL3- L9-CH1-Fc; VL3-L6-VL4-L7-VH4-L8-VH3-L9-CL-Fc; VH3-L6-VH4-L7-VL4-L8-VL3-L9-CL-Fc; VL3-L6-VL4-L7-VH4-L8-VH3-L9-CH1-L10-CL-Fc; VH3-L6-VH4-L7-VL4-L8-VL3-L9-CH1-L10-CL-Fc; VL3-L6-VL4-L7-VH4-L8-VH3-L9-CL-L10-CH1-Fc; VH3-L6-VH4-L7-VL4-L8-VL3-L9-CL-L10-CH1-Fc; VL3-L6-VL4-L7-VH4-L8-VH3-L9-CH1-L10-Fc; VH3-L6-VH4-L7-VL4-L8-VL3-L9-CH1-L10-Fc; VL3-L6-VL4-L7-VH4-L8-VH3-L9-CL-L10-Fc; VH3-L6-VH4-L7-VL4-L8-VL3-L9-CL-L10-Fc; VL3-L6-VL4-L7-VH4-L8-VH3-L9-CH1-L10-CL-L11-Fc; VH3-L6-VH4-L7-VL4-L8-VL3-L9-CH1-L10-CL-L11-Fc; VL3-L6-VL4-L7-VH4-L8-VH3-L9-CL-L10-CH1-L11-Fc; or VH3-L6-VH4-L7-VL4-L8-VL3-L9-CL-L10-CH1-L11-Fc. In some aspects, the first polypeptide has a structure represented by VH1-L1-VH2-L2-VL2-L3-VL1-Fc, and the second polypeptide has a structure represented by VL3-VL4-VH4-VH3; VH3-VH4-VL4-VL3; VL3-VL4-VH4-VH3-Fc; VH3-VH4-VL4-VL3-Fc; VL3-VL4-VH4-VH3-CH1; VH3-VH4-VL4-VL3-CH1; VL3-VL4-VH4-VH3-CL; VH3-VH4-VL4-VL3-CL; VL3-VL4-VH4-VH3-CH1-CL; VH3-VH4-VL4-VL3-CH1-CL; VL3-VL4-VH4-VH3-CL-CH1; VH3-VH4-VL4-VL3-CL-CH1; VL3-VL4-VH4-VH3-CH1-Fc; VH3-VH4-VL4-VL3-CH1-Fc; VL3-VL4-VH4-VH3-CL-Fc; VH3-VH4-VL4-VL3-CL-Fc; VL3-VL4-VH4-VH3-CH1-CL-Fc; VH3-VH4-VL4-VL3-CH1-CL-Fc; VL3-VL4-VH4-VH3-CL-CH1-Fc; VH3-VH4-VL4-VL3-CL-CH1-Fc; VL3-L6-VL4-L7-VH4-L8-VH3; VH3-L6-VH4-L7-VL4-L8-VL3; VL3-L6-VL4-L7-VH4-L8-VH3-Fc; VH3-L6-VH4-L7-VL4- L8-VL3-Fe; VL3-L6-VL4-L7-VH4-L8-VH3-L9-Fc; VH3-L6-VH4-L7-VL4-L8-VL3-L9-Fc; VL3-L6-VL4-L7-VH4-L8-VH3-L9-CH1; VH3-L6-VH4-L7-VL4-L8-VL3-L9-CH1; VL3-L6-VL4-L7-VH4-L8-VH3-L9-CL; VH3-L6-VH4- L7-VL4-L8-VL3-L9-CL; VL3-L6-VL4-L7-VH4-L8-VH3-L9-CH1-L10-CL; VH3-L6-VH4-L7-VL4-L8-VL3-L9-CH1- L10-CL; VL3-L6-VL4-L7-VH4-L8-VH3-L9-CL-L10-CH1; VH3-L6-VH4-L7-VL4-L8-VL3-L9-CL-L10-CH1; VL3-L6-VL4-L7-VH4-L8-VH3-L9-CH1-Fc; VH3-L6-VH4-L7-VL4-L8-VL3-L9-CH1-Fc; VL3-L6-VL4-L7-VH4-L8-VH3- L9-CL-Fc; VH3-L6-VH4-L7-VL4-L8-VL3-L9-CL-Fc; VL3-L6-VL4-L7-VH4-L8-VH3-L9-CH1-L10-CL-Fc; VH3-L6-VH4-L7-VL4-L8-VL3-L9-CH1-L10-CL-Fc; VL3-L6-VL4-L7-VH4-L8-VH3-L9-CL-L10-CH1-Fc; VH3-L6-VH4-L7-VL4-L8-VL3-L9-CL-L10-CH1-Fc; VL3-L6-VL4-L7-VH4-L8-VH3-L9-CH1-L10-Fc; VH3-L6-VH4-L7-VL4-L8-VL3-L9-CH1-L10-Fc; VL3-L6-VL4-L7-VH4-L8-VH3-L9-CL-L10-Fc; VH3-L6-VH4-L7-VL4-L8-VL3-L9-CL-L10-Fc; VL3-L6-VL4-L7-VH4-L8-VH3-L9-CH1-L10-CL-L11-Fc; VH3-L6-VH4-L7-VL4-L8-VL3-L9-CH1-L10-CL-L11-Fc; VL3-L6-VL4-L7-VH4-L8-VH3-L9-CL-L10-CH1-L11-Fc; or VH3-L6-VH4-L7-VL4-L8-VL3-L9-CL-L10-CH1-L11-Fc. In some aspects, the first polypeptide has a structure represented by VL1-L1-VL2-L2-VH2-L3-VH1-L4-Fc, and the second polypeptide has a structure represented by VL3-VL4-VH4-VH3; VH3-VH4-VL4-VL3; VL3-VL4-VH4-VH3-Fc; VH3-VH4-VL4-VL3-Fc; VL3-VL4-VH4-VH3-CH1; VH3-VH4-VL4-VL3-CH1; VL3-VL4-VH4-VH3-CL; VH3-VH4-VL4-VL3-CL; VL3-VL4-VH4-VH3-CH1-CL; VH3-VH4-VL4-VL3-CH1-CL; VL3-VL4-VH4-VH3-CL-CH1; VH3-VH4-VL4-VL3-CL-CH1; VL3-VL4-VH4-VH3-CH1-Fc; VH3-VH4-VL4-VL3-CH1-Fc; VL3-VL4-VH4-VH3-CL-Fc; VH3-VH4-VL4-VL3-CL-Fc; VL3-VL4-VH4-VH3-CH1-CL-Fc; VH3-VH4-VL4-VL3-CH1-CL-Fc; VL3-VL4-VH4-VH3-CL-CH1-Fc; VH3-VH4-VL4-VL3-CL-CH1-Fc; VL3-L6-VL4-L7-VH4-L8-VH3; VH3-L6-VH4-L7-VL4-L8-VL3; VL3-L6-VL4-L7-VH4-L8-VH3-Fc; VH3-L6-VH4-L7-VL4-L8-VL3-Fc; VL3-L6-VL4-L7-VH4-L8-VH3-L9-Fc; VH3-L6-VH4-L7-VL4-L8-VL3-L9-Fc; VL3-L6-VL4-L7-VH4-L8-VH3-L9-CH1; VH3-L6-VH4-L7-VL4-L8-VL3-L9-CH1; VL3-L6-VL4-L7-VH4-L8-VH3-L9-CL; VH3-L6-VH4-L7-VL4-L8-VL3-L9-CL; VL3-L6-VL4-L7-VH4-L8-VH3- L9-CH1-L10-CL; VH3-L6-VH4-L7-VL4-L8-VL3-L9-CH1-L10-CL; VL3-L6-VL4-L7-VH4-L8-VH3-L9-CL-L10-CH1; VH3-L6-VH4-L7-VL4-L8-VL3-L9-CL-L10-CH1; VL3-L6-VL4-L7-VH4-L8-VH3-L9-CH1-Fc; VH3-L6-VH4-L7-VL4-L8-VL3-L9-CH1-Fc; VL3-L6-VL4-L7-VH4-L8-VH3-L9-CL-Fc; VH3-L6-VH4-L7-VL4-L8-VL3-L9-CL-Fc; VL3-L6-VL4-L7-VH4-L8-VH3-L9-CH1-L10-CL-Fc; VH3-L6-VH4-L7-VL4-L8-VL3-L9-CH1-L10-CL-Fc; VL3-L6-VL4-L7-VH4-L8-VH3-L9-CL-L10-CH1-Fc; VH3-L6-VH4-L7-VL4-L8-VL3-L9-CL-L10-CH1-Fc; VL3-L6-VL4-L7-VH4-L8-VH3-L9-CH1-L10-Fc; VH3-L6-VH4-L7-VL4-L8-VL3-L9-CH1-L10-Fc; VL3-L6-VL4-L7-VH4-L8-VH3-L9-CL-L10-Fc; VH3-L6-VH4-L7-VL4-L8-VL3-L9-CL-L10-Fc; VL3-L6-VL4-L7-VH4-L8-VH3-L9-CH1-L10-CL-L11-Fc; VH3-L6-VH4-L7-VL4-L8-VL3-L9-CH1-L10-CL-L11-Fc; VL3-L6-VL4-L7-VH4-L8-VH3-L9-CL-L10-CH1-L11-Fc; or VH3-L6-VH4-L7-VL4-L8-VL3-L9-CL-L10-CH1-L11-Fc. In some aspects, the first polypeptide has a structure represented by VH1-L1-VH2-L2-VL2-L3-VL1-L4-Fc, and the second polypeptide has a structure represented by VL3-VL4-VH4-VH3; VH3-VH4-VL4-VL3; VL3-VL4-VH4-VH3-Fc; VH3-VH4-VL4-VL3-Fe; VL3-VL4-VH4-VH3-CH1; VH3-VH4-VL4-VL3-CH1; VL3-VL4-VH4-VH3-CL; VH3-VH4-VL4-VL3-CL; VL3-VL4-VH4-VH3-CH1-CL; VH3-VH4-VL4-VL3-CH1-CL; VL3-VL4-VH4-VH3-CL-CH1; VH3-VH4-VL4-VL3-CL-CH1; VL3-VL4-VH4-VH3-CH1-Fc; VH3-VH4-VL4-VL3-CH1-Fc; VL3-VL4-VH4-VH3-CL-Fc; VH3-VH4-VL4-VL3-CL-Fc; VL3-VL4-VH4-VH3-CH1-CL-Fc; VH3-VH4-VL4-VL3-CH1-CL-Fc; VL3-VL4-VH4-VH3-CL-CH1-Fc; VH3-VH4-VL4-VL3-CL-CH1-Fc; VL3-L6-VL4-L7-VH4-L8-VH3; VH3-L6-VH4-L7-VL4-L8-VL3; VL3-L6-VL4-L7-VH4-L8-VH3-Fc; VH3-L6- VH4-L7-VL4-L8-VL3-Fc; VL3-L6-VL4-L7-VH4-L8-VH3-L9-Fc; VH3-L6-VH4-L7-VL4-L8-VL3-L9-Fc; VL3-L6-VL4-L7-VH4-L8-VH3-L9-CH1; VH3-L6-VH4-L7-VL4-L8-VL3-L9-CH1; VL3-L6-VL4-L7-VH4-L8-VH3-L9-CL; VH3- L6-VH4-L7-VL4-L8-VL3-L9-CL; VL3-L6-VL4-L7-VH4-L8-VH3-L9-CH1-L10-CL; VH3-L6-VH4-L7-VL4-L8-VL3- L9-CH1-L10-CL; VL3-L6-VL4-L7-VH4-L8-VH3-L9-CL-L10-CH1; VH3-L6-VH4-L7-VL4-L8-VL3-L9-CL-L10-CH1; VL3-L6-VL4-L7-VH4-L8-VH3-L9-CH1-Fc; VH3-L6-VH4-L7-VL4-L8-VL3-L9-CH1-Fe; VL3-L6-VL4-L7-VH4- L8-VH3-L9-CL-Fc; VH3-L6-VH4-L7-VL4-L8-VL3-L9-CL-Fc; VL3-L6-VL4-L7-VH4-L8-VH3-L9-CH1-L10-CL-Fc; VH3-L6-VH4-L7-VL4-L8-VL3-L9-CH1-L10-CL-Fc; VL3-L6-VL4-L7-VH4-L8-VH3-L9-CL-L10-CH1-Fc; VH3-L6-VH4-L7-VL4-L8-VL3-L9-CL-L10-CH1-Fe; VL3-L6-VL4-L7-VH4-L8-VH3-L9-CH1-L10-Fc; VH3-L6-VH4-L7-VL4-L8-VL3-L9-CH1-L10-Fc; VL3-L6-VL4-L7-VH4-L8-VH3-L9-CL-L10-Fc; VH3-L6-VH4-L7-VL4-L8-VL3-L9-CL-L10-Fc; VL3-L6-VL4-L7-VH4-L8-VH3-L9-CH1-L10-CL-L11-Fc; VH3-L6-VH4-L7-VL4-L8-VL3-L9-CH1-L10-CL-L11-Fc; VL3-L6-VL4-L7-VH4-L8-VH3-L9-CL-L10-CH1-L11-Fc; or VH3-L6-VH4-L7-VL4-L8-VL3-L9-CL-L10-CH1-L11-Fc. In some aspects, the first polypeptide has a structure represented by VL1-L1-VL2-L2-VH2-L3-VH1-L4-CH1, and the second polypeptide has a structure represented by VL3-VL4-VH4-VH3; VH3-VH4-VL4-VL3; VL3-VL4-VH4-VH3-Fc; VH3-VH4-VL4-VL3-Fc; VL3-VL4-VH4-VH3-CH1; VH3-VH4-VL4-VL3-CH1; VL3-VL4-VH4-VH3-CL; VH3-VH4-VL4-VL3-CL; VL3-VL4-VH4-VH3-CH1-CL; VH3-VH4-VL4-VL3-CH1-CL; VL3-VL4-VH4-VH3-CL-CH1; VH3-VH4-VL4-VL3-CL-CH1; VL3-VL4-VH4-VH3-CH1-Fe; VH3-VH4-VL4-VL3-CH1-Fc; VL3-VL4-VH4-VH3-CL-Fc; VH3-VH4-VL4-VL3-CL-Fc; VL3-VL4-VH4-VH3-CH1-CL-Fc; VH3-VH4-VL4-VL3-CH1-CL-Fc; VL3-VL4-VH4-VH3-CL-CH1-Fc; VH3-VH4-VL4-VL3-CL-CH1-Fc; VL3-L6-VL4-L7-VH4-L8-VH3; VH3-L6-VH4-L7-VL4-L8-VL3; VL3-L6-VL4-L7-VH4-L8-VH3-Fc; VH3-L6-VH4-L7-VL4-L8-VL3-Fc; VL3-L6-VL4-L7-VH4-L8-VH3-L9-Fc; VH3-L6-VH4-L7-VL4-L8-VL3-L9-Fc; VL3-L6-VL4-L7-VH4-L8-VH3-L9-CH1; VH3-L6-VH4-L7- VL4-L8-VL3-L9-CH1; VL3-L6-VL4-L7-VH4-L8-VH3-L9-CL; VH3-L6-VH4-L7-VL4-L8-VL3-L9-CL; VL3-L6-VL4- L7-VH4-L8-VH3-L9-CH1-L10-CL; VH3-L6-VH4-L7-VL4-L8-VL3-L9-CH1-L10-CL; VL3-L6-VL4-L7-VH4-L8-VH3-L9-CL-L10-CH1; VH3-L6-VH4-L7-VL4-L8-VL3-L9-CL-L10-CH1; VL3-L6-VL4-L7-VH4-L8-VH3-L9-CH1-Fc; VH3-L6-VH4-L7-VL4-L8-VL3-L9-CH1-Fc; VL3-L6-VL4-L7-VH4-L8-VH3-L9-CL-Fc; VH3-L6-VH4-L7-VL4-L8-VL3-L9-CL-Fc; VL3-L6-VL4-L7-VH4-L8-VH3-L9-CH1-L10-CL-Fc; VH3-L6-VH4-L7-VL4-L8-VL3-L9-CH1-L10-CL-Fc; VL3-L6-VL4-L7-VH4-L8-VH3-L9-CL-L10-CH1-Fc; VH3-L6-VH4-L7-VL4-L8-VL3-L9-CL-L10-CH1-Fc; VL3-L6-VL4-L7-VH4-L8-VH3-L9-CH1-L10-Fc; VH3-L6-VH4-L7-VL4-L8-VL3-L9-CH1-L10-Fc; VL3-L6-VL4- L7-VH4-L8-VH3-L9-CL-L10-Fc; VH3-L6-VH4-L7-VL4-L8-VL3-L9-CL-L10-Fc; VL3-L6-VL4-L7-VH4-L8-VH3-L9-CH1-L10-CL-L11-Fc; VH3-L6-VH4-L7-VL4-L8-VL3-L9-CH1-L10-CL-L11-Fc; VL3-L6-VL4-L7-VH4-L8-VH3-L9-CL-L10-CH1-L11-Fc; or VH3-L6-VH4-L7-VL4-L8-VL3-L9-CL-L10-CH1-L11-Fc. In some aspects, the first polypeptide has a structure represented by VH1-L1-VH2-L2-VL2-L3-VL1-L4-CH1, and the second polypeptide has a structure represented by VL3-VL4-VH4-VH3; VH3-VH4-VL4-VL3; VL3-VL4-VH4-VH3-Fc; VH3-VH4-VL4-VL3-Fc; VL3-VL4-VH4-VH3-CH1; VH3-VH4-VL4-VL3-CH1; VL3-VL4-VH4-VH3-CL; VH3-VH4-VL4-VL3-CL; VL3-VL4-VH4-VH3-CH1-CL; VH3-VH4-VL4-VL3-CH1-CL; VL3-VL4-VH4-VH3-CL-CH1; VH3-VH4-VL4-VL3-CL-CH1; VL3-VL4-VH4-VH3-CH1-Fc; VH3-VH4-VL4-VL3-CH1-Fc; VL3-VL4-VH4-VH3-CL-Fc; VH3-VH4-VL4-VL3-CL-Fc; VL3-VL4-VH4-VH3-CH1-CL-Fc; VH3-VH4-VL4-VL3-CH1-CL-Fc; VL3-VL4-VH4-VH3-CL-CH1-Fc; VH3-VH4-VL4-VL3-CL-CH1-Fc; VL3-L6-VL4-L7-VH4-L8-VH3; VH3-L6-VH4-L7-VL4-L8-VL3; VL3-L6-VL4-L7-VH4-L8-VH3-Fc; VH3-L6-VH4-L7-VL4-L8-VL3-Fc; VL3-L6-VL4-L7-VH4-L8-VH3-L9-Fc; VH3-L6-VH4-L7-VL4-L8-VL3-L9-Fe; VL3-L6-VL4-L7-VH4-L8-VH3-L9-CH1; VH3-L6-VH4-L7-VL4-L8-VL3-L9-CH1; VL3-L6-VL4- L7-VH4-L8-VH3-L9-CL; VH3-L6-VH4-L7-VL4-L8-VL3-L9-CL; VL3-L6-VL4-L7-VH4-L8-VH3-L9-CH1-L10-CL; VH3-L6-VH4-L7-VL4-L8-VL3-L9-CH1-L10-CL; VL3-L6-VL4-L7-VH4-L8-VH3-L9-CL-L10-CH1; VH3-L6-VH4-L7-VL4-L8-VL3-L9-CL-L10-CH1; VL3-L6-VL4-L7-VH4-L8-VH3-L9-CH1-Fc; VH3-L6-VH4-L7-VL4-L8-VL3- L9-CH1-Fc; VL3-L6-VL4-L7-VH4-L8-VH3-L9-CL-Fc; VH3-L6-VH4-L7-VL4-L8-VL3-L9-CL-Fc; VL3-L6-VL4-L7-VH4-L8-VH3-L9-CH1-L10-CL-Fc; VH3-L6-VH4-L7-VL4-L8-VL3-L9-CH1-L10-CL-Fc; VL3-L6-VL4-L7-VH4-L8-VH3-L9-CL-L10-CH1-Fc; VH3-L6-VH4-L7-VL4-L8-VL3-L9-CL-L10-CH1-Fc; VL3-L6-VL4-L7-VH4-L8-VH3-L9-CH1-L10-Fc; VH3-L6-VH4-L7-VL4-L8-VL3-L9-CH1-L10-Fc; VL3-L6-VL4-L7-VH4-L8-VH3-L9-CL-L10-Fc; VH3-L6-VH4-L7-VL4-L8-VL3-L9-CL-L10-Fc; VL3-L6-VL4-L7-VH4-L8-VH3-L9-CH1-L10-CL-L11-Fc; VH3-L6-VH4-L7-VL4-L8-VL3-L9-CH1-L10-CL-L11-Fc; VL3-L6-VL4-L7-VH4-L8-VH3-L9-CL-L10-CH1-L11-Fc; or VH3-L6-VH4-L7-VL4-L8-VL3-L9-CL-L10-CH1-L11-Fc. In some aspects, the first polypeptide has a structure represented by VL1-L1-VL2-L2-VH2-L3-VH1-L4-CL, and the second polypeptide has a structure represented by VL3-VL4-VH4-VH3; VH3-VH4-VL4-VL3; VL3-VL4-VH4-VH3-Fc; VH3-VH4-VL4-VL3-Fc; VL3-VL4-VH4-VH3-CH1; VH3-VH4-VL4-VL3-CH1; VL3-VL4-VH4-VH3-CL; VH3-VH4-VL4-VL3-CL; VL3-VL4-VH4-VH3-CH1-CL; VH3-VH4-VL4-VL3-CH1-CL; VL3-VL4-VH4-VH3-CL-CH1; VH3-VH4-VL4-VL3-CL-CH1; VL3-VL4-VH4-VH3-CH1-Fc; VH3-VH4-VL4-VL3-CH1-Fc; VL3-VL4-VH4-VH3-CL-Fc; VH3-VH4-VL4-VL3-CL-Fc; VL3-VL4-VH4-VH3-CH1-CL-Fc; VH3-VH4-VL4-VL3-CH1-CL-Fc; VL3-VL4-VH4-VH3-CL-CH1-Fc; VH3-VH4-VL4-VL3-CL-CH1-Fc; VL3-L6-VL4-L7-VH4-L8-VH3; VH3-L6-VH4-L7-VL4-L8-VL3; VL3-L6-VL4-L7-VH4-L8-VH3-Fc; VH3-L6-VH4-L7-VL4- L8-VL3-Fe; VL3-L6-VL4-L7-VH4-L8-VH3-L9-Fc; VH3-L6-VH4-L7-VL4-L8-VL3-L9-Fc; VL3-L6-VL4-L7-VH4-L8-VH3-L9-CH1; VH3-L6-VH4-L7-VL4-L8-VL3-L9-CH1; VL3-L6-VL4-L7-VH4-L8-VH3-L9-CL; VH3-L6-VH4- L7-VL4-L8-VL3-L9-CL; VL3-L6-VL4-L7-VH4-L8-VH3-L9-CH1-L10-CL; VH3-L6-VH4-L7-VL4-L8-VL3-L9-CH1- L10-CL; VL3-L6-VL4-L7-VH4-L8-VH3-L9-CL-L10-CH1; VH3-L6-VH4-L7-VL4-L8-VL3-L9-CL-L10-CH1; VL3-L6-VL4-L7-VH4-L8-VH3-L9-CH1-Fc; VH3-L6-VH4-L7-VL4-L8-VL3-L9-CH1-Fc; VL3-L6-VL4-L7-VH4-L8-VH3- L9-CL-Fc; VH3-L6-VH4-L7-VL4-L8-VL3-L9-CL-Fc; VL3-L6-VL4-L7-VH4-L8-VH3-L9-CH1-L10-CL-Fc; VH3-L6-VH4-L7-VL4-L8-VL3-L9-CH1-L10-CL-Fc; VL3-L6-VL4-L7-VH4-L8-VH3-L9-CL-L10-CH1-Fc; VH3-L6-VH4-L7-VL4-L8-VL3-L9-CL-L10-CH1-Fc; VL3-L6-VL4-L7-VH4-L8-VH3-L9-CH1-L10-Fc; VH3-L6-VH4-L7-VL4-L8-VL3-L9-CH1-L10-Fc; VL3-L6-VL4-L7-VH4-L8-VH3-L9-CL-L10-Fc; VH3-L6-VH4-L7-VL4-L8-VL3-L9-CL-L10-Fc; VL3-L6-VL4-L7-VH4-L8-VH3-L9-CH1-L10-CL-L11-Fc; VH3-L6-VH4-L7-VL4-L8-VL3-L9-CH1-L10-CL-L11-Fc; VL3-L6-VL4-L7-VH4-L8-VH3-L9-CL-L10-CH1-L11-Fc; or VH3-L6-VH4-L7-VL4-L8-VL3-L9-CL-L10-CH1-L11-Fc. In some aspects, the first polypeptide has a structure represented by VH1-L1-VH2-L2-VL2-L3-VL1-L4-CL, and the second polypeptide has a structure represented by VL3-VL4-VH4-VH3; VH3-VH4-VL4-VL3; VL3-VL4-VH4-VH3-Fc; VH3-VH4-VL4-VL3-Fc; VL3-VL4-VH4-VH3-CH1; VH3-VH4-VL4-VL3-CH1; VL3-VL4-VH4-VH3-CL; VH3-VH4-VL4-VL3-CL; VL3-VL4-VH4-VH3-CH1-CL; VH3-VH4-VL4-VL3-CH1-CL; VL3-VL4-VH4-VH3-CL-CH1; VH3-VH4-VL4-VL3-CL-CH1; VL3-VL4-VH4-VH3-CH1-Fc; VH3-VH4-VL4-VL3-CH1-Fc; VL3-VL4-VH4-VH3-CL-Fc; VH3-VH4-VL4-VL3-CL-Fc; VL3-VL4-VH4-VH3-CH1-CL-Fc; VH3-VH4-VL4-VL3-CH1-CL-Fc; VL3-VL4-VH4-VH3-CL-CH1-Fc; VH3-VH4-VL4-VL3-CL-CH1-Fc; VL3-L6-VL4-L7-VH4-L8-VH3; VH3-L6-VH4-L7-VL4-L8-VL3; VL3-L6-VL4-L7-VH4-L8-VH3-Fc; VH3-L6-VH4-L7-VL4-L8-VL3-Fc; VL3-L6-VL4-L7-VH4-L8-VH3-L9-Fc; VH3-L6-VH4-L7-VL4-L8-VL3-L9-Fc; VL3-L6-VL4-L7-VH4-L8-VH3-L9-CH1; VH3-L6-VH4-L7-VL4-L8-VL3-L9-CH1; VL3-L6-VL4-L7-VH4-L8-VH3-L9-CL; VH3-L6-VH4-L7-VL4-L8-VL3-L9-CL; VL3-L6-VL4-L7-VH4-L8-VH3- L9-CH1-L10-CL; VH3-L6-VH4-L7-VL4-L8-VL3-L9-CH1-L10-CL; VL3-L6-VL4-L7-VH4-L8-VH3-L9-CL-L10-CH1; VH3-L6-VH4-L7-VL4-L8-VL3-L9-CL-L10-CH1; VL3-L6-VL4-L7-VH4-L8-VH3-L9-CH1-Fc; VH3-L6-VH4-L7-VL4-L8-VL3-L9-CH1-Fc; VL3-L6-VL4-L7-VH4-L8-VH3-L9-CL-Fc; VH3-L6-VH4-L7-VL4-L8-VL3-L9-CL-Fc; VL3-L6-VL4-L7-VH4-L8-VH3-L9-CH1-L10-CL-Fc; VH3-L6-VH4-L7-VL4-L8-VL3-L9-CH1-L10-CL-Fc; VL3-L6-VL4-L7-VH4-L8-VH3-L9-CL-L10-CH1-Fc; VH3-L6-VH4-L7-VL4-L8-VL3-L9-CL-L10-CH1-Fc; VL3-L6-VL4-L7-VH4-L8-VH3-L9-CH1-L10-Fc; VH3-L6-VH4-L7-VL4-L8-VL3-L9-CH1-L10-Fc; VL3-L6-VL4-L7-VH4-L8-VH3-L9-CL-L10-Fc; VH3-L6-VH4-L7-VL4-L8-VL3-L9-CL-L10-Fc; VL3-L6-VL4-L7-VH4-L8-VH3-L9-CH1-L10-CL-L11-Fc; VH3-L6-VH4-L7-VL4-L8-VL3-L9-CH1-L10-CL-L11-Fc; VL3-L6-VL4-L7-VH4-L8-VH3-L9-CL-L10-CH1-L11-Fc; or VH3-L6-VH4-L7-VL4-L8-VL3-L9-CL-L10-CH1-L11-Fc. In some aspects, the first polypeptide has a structure represented by VL1-L1-VL2-L2-VH2-L3-VH1-L4-CH1-L5-CL, and the second polypeptide has a structure represented by VL3-VL4-VH4-VH3; VH3-VH4-VL4-VL3; VL3-VL4-VH4-VH3-Fc; VH3-VH4-VL4-VL3-Fc; VL3-VL4-VH4-VH3-CH1; VH3-VH4-VL4-VL3-CH1; VL3-VL4-VH4-VH3-CL; VH3-VH4-VL4-VL3-CL; VL3-VL4-VH4-VH3-CH1-CL; VH3-VH4-VL4-VL3-CH1-CL; VL3-VL4-VH4-VH3-CL-CH1; VH3-VH4-VL4-VL3-CL-CH1; VL3-VL4-VH4-VH3-CH1-Fc; VH3-VH4-VL4-VL3-CH1-Fc; VL3-VL4-VH4-VH3-CL-Fc; VH3-VH4-VL4-VL3-CL-Fc; VL3-VL4-VH4-VH3-CH1-CL-Fc; VH3-VH4-VL4-VL3-CH1-CL-Fc; VL3-VL4-VH4-VH3-CL-CH1-Fc; VH3-VH4-VL4-VL3-CL-CH1-Fc; VL3-L6-VL4-L7-VH4-L8-VH3; VH3-L6-VH4-L7-VL4-L8-VL3; VL3-L6-VL4-L7-VH4-L8-VH3-Fe; VH3-L6-VH4-L7-VL4-L8-VL3-Fc; VL3-L6-VL4-L7-VH4-L8-VH3-L9-Fc; VH3-L6-VH4-L7-VL4-L8-VL3-L9- Fc; VL3-L6-VL4-L7-VH4-L8-VH3-L9-CH1; VH3-L6-VH4-L7-VL4-L8-VL3-L9-CH1; VL3-L6-VL4-L7-VH4-L8-VH3-L9-CL; VH3-L6-VH4-L7-VL4-L8-VL3-L9-CL; VL3-L6-VL4-L7-VH4-L8-VH3-L9-CH1-L10-CL; VH3-L6-VH4-L7-VL4-L8-VL3-L9-CH1-L10-CL; VL3-L6-VL4-L7-VH4-L8-VH3-L9-CL-L10-CH1; VH3-L6-VH4-L7-VL4-L8-VL3-L9-CL-L10-CH1; VL3-L6-VL4-L7-VH4-L8-VH3-L9-CH1-Fc; VH3-L6-VH4-L7-VL4-L8-VL3-L9-CH1-Fc; VL3-L6-VL4-L7-VH4-L8-VH3-L9-CL-Fc; VH3-L6-VH4-L7-VL4-L8-VL3-L9-CL-Fc; VL3-L6-VL4-L7-VH4-L8-VH3-L9-CH1-L10-CL-Fc; VH3-L6-VH4-L7-VL4-L8-VL3-L9-CH1-L10-CL-Fc; VL3-L6-VL4-L7-VH4-L8-VH3-L9-CL-L10-CH1-Fc; VH3-L6-VH4-L7-VL4-L8-VL3-L9-CL-L10-CH1-Fc; VL3-L6-VL4-L7-VH4-L8-VH3-L9-CH1-L10-Fc; VH3-L6-VH4-L7-VL4-L8-VL3-L9-CH1-L10-Fc; VL3-L6-VL4-L7-VH4-L8-VH3-L9-CL-L10-Fc; VH3-L6-VH4-L7-VL4-L8-VL3-L9-CL-L10-Fc; VL3-L6-VL4-L7-VH4-L8-VH3-L9-CH1-L10-CL-L11-Fc; VH3-L6-VH4-L7-VL4-L8-VL3-L9-CH1-L10-CL-L11-Fc; VL3-L6-VL4-L7-VH4-L8-VH3-L9-CL-L10-CH1-L11-Fc; or VH3-L6-VH4-L7-VL4-L8-VL3-L9-CL-L10-CH1-L11-Fc. In some aspects, the first polypeptide has a structure represented by VH1-L1-VH2-L2-VL2-L3-VL1-L4-CH1-L5-CL, and the second polypeptide has a structure represented by VL3-VL4-VH4-VH3; VH3-VH4-VL4-VL3; VL3-VL4-VH4-VH3-Fc; VH3-VH4-VL4-VL3-Fc; VL3-VL4-VH4-VH3-CH1; VH3-VH4-VL4-VL3-CH1; VL3-VL4-VH4-VH3-CL; VH3-VH4-VL4-VL3-CL; VL3-VL4-VH4-VH3-CH1-CL; VH3-VH4-VL4-VL3-CH1-CL; VL3-VL4-VH4-VH3-CL-CH1; VH3-VH4-VL4-VL3-CL-CH1; VL3-VL4-VH4-VH3-CH1-Fc; VH3-VH4-VL4-VL3-CH1-Fc; VL3-VL4-VH4-VH3-CL-Fc; VH3-VH4-VL4-VL3-CL-Fc; VL3-VL4-VH4-VH3-CH1-CL-Fc; VH3-VH4-VL4-VL3-CH1-CL-Fc; VL3-VL4-VH4-VH3-CL-CH1-Fc; VH3-VH4-VL4-VL3-CL-CH1-Fc; VL3-L6-VL4-L7-VH4-L8-VH3; VH3-L6-VH4-L7-VL4-L8-VL3; VL3-L6-VL4-L7-VH4-L8-VH3-Fc; VH3-L6-VH4-L7-VL4-L8-VL3- Fc; VL3-L6-VL4-L7-VH4-L8-VH3-L9-Fc; VH3-L6-VH4-L7-VL4-L8-VL3-L9-Fc; VL3-L6-VL4-L7-VH4-L8-VH3- L9-CH1; VH3-L6-VH4-L7-VL4-L8-VL3-L9-CH1; VL3-L6-VL4-L7-VH4-L8-VH3-L9-CL; VH3-L6-VH4-L7-VL4- L8-VL3-L9-CL; VL3-L6-VL4-L7-VH4-L8-VH3-L9-CH1-L10-CL; VH3-L6-VH4-L7-VL4-L8-VL3-L9-CH1-L10-CL; VL3-L6-VL4-L7-VH4-L8-VH3-L9-CL-L10-CH1; VH3-L6-VH4-L7-VL4-L8-VL3-L9-CL-L10-CH1; VL3-L6-VL4- L7-VH4-L8-VH3-L9-CH1-Fc; VH3-L6-VH4-L7-VL4-L8-VL3-L9-CH1-Fc; VL3-L6-VL4-L7-VH4-L8-VH3-L9-CL-Fc; VH3-L6-VH4-L7-VL4-L8-VL3-L9-CL-Fc; VL3-L6-VL4-L7-VH4-L8-VH3-L9-CH1-L10-CL-Fc; VH3-L6-VH4-L7-VL4-L8-VL3-L9-CH1-L10-CL-Fc; VL3-L6-VL4-L7-VH4-L8-VH3-L9-CL-L10-CH1-Fc; VH3-L6-VH4-L7-VL4-L8-VL3-L9-CL-L10-CH1-Fc; VL3-L6-VL4-L7-VH4-L8-VH3-L9-CH1-L10-Fc; VH3-L6-VH4-L7-VL4-L8-VL3-L9-CH1-L10-Fc; VL3-L6-VL4-L7-VH4-L8-VH3-L9-CL-L10-Fc; VH3-L6-VH4-L7-VL4-L8-VL3-L9-CL-L10-Fc; VL3-L6-VL4-L7-VH4-L8-VH3-L9-CH1-L10-CL-L11-Fc; VH3-L6-VH4-L7-VL4-L8-VL3-L9-CH1-L10-CL-L11-Fc; VL3-L6-VL4-L7-VH4-L8-VH3-L9-CL-L10-CH1-L11-Fc; or VH3-L6-VH4-L7-VL4-L8-VL3-L9-CL-L10-CH1-L11-Fc. In some aspects, the first polypeptide has a structure represented by VL1-L1-VL2-L2-VH2-L3-VH1-L4-CL-L5-CH1, and the second polypeptide has a structure represented by VL3-VL4-VH4-VH3; VH3-VH4-VL4-VL3; VL3-VL4-VH4-VH3-Fc; VH3-VH4-VL4-VL3-Fc; VL3-VL4-VH4-VH3-CH1; VH3-VH4-VL4-VL3-CH1; VL3-VL4-VH4-VH3-CL; VH3-VH4-VL4-VL3-CL; VL3-VL4-VH4-VH3-CH1-CL; VH3-VH4-VL4-VL3-CH1-CL; VL3-VL4-VH4-VH3-CL-CH1; VH3-VH4-VL4-VL3-CL-CH1; VL3-VL4-VH4-VH3-CH1-Fc; VH3-VH4-VL4-VL3-CH1-Fc; VL3-VL4-VH4-VH3-CL-Fc; VH3-VH4-VL4-VL3-CL-Fc; VL3-VL4-VH4-VH3-CH1-CL-Fc; VH3-VH4-VL4-VL3-CH1-CL-Fc; VL3-VL4-VH4-VH3-CL-CH1-Fc; VH3-VH4-VL4-VL3-CL-CH1-Fc; VL3-L6-VL4-L7-VH4-L8-VH3; VH3-L6-VH4-L7-VL4-L8-VL3; VL3-L6-VL4-L7-VH4-L8-VH3-Fc; VH3-L6-VH4-L7-VL4-L8-VL3-Fc; VL3-L6-VL4-L7-VH4-L8-VH3-L9-Fc; VH3-L6-VH4-L7-VL4-L8-VL3-L9-Fc; VL3-L6-VL4-L7-VH4-L8-VH3-L9-CH1; VH3-L6-VH4-L7-VL4-L8-VL3-L9-CH1; VL3-L6-VL4-L7-VH4-L8-VH3-L9-CL; VH3-L6-VH4-L7-VL4-L8-VL3-L9-CL; VL3-L6-VL4-L7-VH4-L8-VH3- L9-CH1-L10-CL; VH3-L6-VH4-L7-VL4-L8-VL3-L9-CH1-L10-CL; VL3-L6-VL4-L7-VH4-L8-VH3-L9-CL-L10-CH1; VH3-L6-VH4-L7-VL4-L8-VL3-L9-CL-L10-CH1; VL3-L6-VL4-L7-VH4-L8-VH3-L9-CH1-Fc; VH3-L6-VH4-L7-VL4-L8-VL3-L9-CH1-Fc; VL3-L6-VL4-L7-VH4-L8-VH3-L9-CL-Fc; VH3-L6-VH4-L7-VL4-L8-VL3-L9-CL-Fc; VL3-L6-VL4-L7-VH4-L8-VH3-L9-CH1-L10-CL-Fc; VH3-L6-VH4-L7-VL4-L8-VL3-L9-CH1-L10-CL-Fc; VL3-L6-VL4-L7-VH4-L8-VH3-L9-CL-L10-CH1-Fc; VH3-L6-VH4-L7-VL4-L8-VL3-L9-CL-L10-CH1-Fc; VL3-L6-VL4-L7-VH4-L8-VH3-L9-CH1-L10-Fc; VH3-L6-VH4-L7-VL4-L8-VL3-L9-CH1-L10-Fc; VL3-L6-VL4-L7-VH4-L8-VH3-L9-CL-L10-Fc; VH3-L6-VH4-L7-VL4-L8-VL3-L9-CL-L10-Fc; VL3-L6-VL4-L7-VH4-L8-VH3-L9-CH1-L10-CL-L11-Fc; VH3-L6-VH4-L7-VL4-L8-VL3-L9-CH1-L10-CL-L11-Fc; VL3-L6-VL4-L7-VH4-L8-VH3-L9-CL-L10-CH1-L11-Fc; or VH3-L6-VH4-L7-VL4-L8-VL3-L9-CL-L10-CH1-L11-Fc. In some aspects, the first polypeptide has a structure represented by VH1-L1-VH2-L2-VL2-L3-VL1-L4-CL-L5-CH1, and the second polypeptide has a structure represented by VL3-VL4-VH4-VH3; VH3-VH4-VL4-VL3; VL3-VL4-VH4-VH3-Fc; VH3-VH4-VL4-VL3-Fc; VL3-VL4-VH4-VH3-CH1; VH3-VH4-VL4-VL3-CH1; VL3-VL4-VH4-VH3-CL; VH3-VH4-VL4-VL3-CL; VL3-VL4-VH4-VH3-CH1-CL; VH3-VH4-VL4-VL3-CH1-CL; VL3-VL4-VH4-VH3-CL-CH1; VH3-VH4-VL4-VL3-CL-CH1; VL3-VL4-VH4-VH3-CH1-Fc; VH3-VH4-VL4-VL3-CH1-Fc; VL3-VL4-VH4-VH3-CL-Fc; VH3-VH4-VL4-VL3-CL-Fc; VL3-VL4-VH4-VH3-CH1-CL-Fc; VH3-VH4-VL4-VL3-CH1-CL-Fc; VL3-VL4-VH4-VH3-CL-CH1-Fc; VH3-VH4-VL4-VL3-CL-CH1-Fc; VL3-L6-VL4-L7-VH4-L8-VH3; VH3-L6-VH4-L7-VL4-L8-VL3; VL3-L6-VL4-L7-VH4-L8-VH3-Fe; VH3-L6-VH4-L7-VL4-L8-VL3-Fc; VL3-L6-VL4-L7-VH4-L8-VH3-L9-Fc; VH3-L6-VH4-L7-VL4-L8-VL3-L9- Fc; VL3-L6-VL4-L7-VH4-L8-VH3-L9-CH1; VH3-L6-VH4-L7-VL4-L8-VL3-L9-CH1; VL3-L6-VL4-L7-VH4-L8-VH3-L9-CL; VH3-L6-VH4-L7-VL4-L8-VL3-L9-CL; VL3-L6-VL4-L7-VH4-L8-VH3-L9-CH1-L10-CL; VH3-L6-VH4-L7-VL4-L8-VL3-L9-CH1-L10-CL; VL3-L6-VL4-L7-VH4-L8-VH3-L9-CL-L10-CH1; VH3-L6-VH4-L7-VL4-L8-VL3-L9-CL-L10-CH1; VL3-L6-VL4-L7-VH4-L8-VH3-L9-CH1-Fc; VH3-L6-VH4-L7-VL4-L8-VL3-L9-CH1-Fc; VL3-L6-VL4-L7-VH4-L8-VH3-L9-CL-Fc; VH3-L6-VH4-L7-VL4-L8-VL3-L9-CL-Fc; VL3-L6-VL4-L7-VH4-L8-VH3-L9-CH1-L10-CL-Fc; VH3-L6-VH4-L7-VL4-L8-VL3-L9-CH1-L10-CL-Fc; VL3-L6-VL4-L7-VH4-L8-VH3-L9-CL-L10-CH1-Fc; VH3-L6-VH4-L7-VL4-L8-VL3-L9-CL-L10-CH1-Fc; VL3-L6-VL4-L7-VH4-L8-VH3-L9-CH1-L10-Fc; VH3-L6-VH4-L7-VL4-L8-VL3-L9-CH1-L10-Fc; VL3-L6-VL4-L7-VH4-L8-VH3-L9-CL-L10-Fc; VH3-L6-VH4-L7-VL4-L8-VL3-L9-CL-L10-Fc; VL3-L6-VL4-L7-VH4-L8-VH3-L9-CH1-L10-CL-L11-Fc; VH3-L6-VH4-L7-VL4-L8-VL3-L9-CH1-L10-CL-L11-Fc; VL3-L6-VL4-L7-VH4-L8-VH3-L9-CL-L10-CH1-L11-Fc; or VH3-L6-VH4-L7-VL4-L8-VL3-L9-CL-L10-CH1-L11-Fc. In some aspects, the first polypeptide has a structure represented by VL1-L1-VL2-L2-VH2-L3-VH1-L4-CH1-Fc, and the second polypeptide has a structure represented by VL3-VL4-VH4-VH3; VH3-VH4-VL4-VL3; VL3-VL4-VH4-VH3-Fc; VH3-VH4-VL4-VL3-Fc; VL3-VL4-VH4-VH3-CH1; VH3-VH4-VL4-VL3-CH1; VL3-VL4-VH4-VH3-CL; VH3-VH4-VL4-VL3-CL; VL3-VL4-VH4-VH3-CH1-CL; VH3-VH4-VL4-VL3-CH1-CL; VL3-VL4-VH4-VH3-CL-CH1; VH3-VH4-VL4-VL3-CL-CH1; VL3-VL4-VH4-VH3-CH1-Fc; VH3-VH4-VL4-VL3-CH1-Fc; VL3-VL4-VH4-VH3-CL-Fc; VH3-VH4-VL4-VL3-CL-Fc; VL3-VL4-VH4-VH3-CH1-CL-Fc; VH3-VH4-VL4-VL3-CH1-CL-Fc; VL3-VL4-VH4-VH3-CL-CH1-Fc; VH3-VH4-VL4-VL3-CL-CH1-Fc; VL3-L6-VL4-L7-VH4-L8-VH3; VH3-L6-VH4-L7-VL4-L8-VL3; VL3-L6-VL4-L7-VH4-L8-VH3-Fc; VH3-L6-VH4-L7-VL4-L8-VL3-Fc; VL3-L6-VL4-L7-VH4-L8-VH3-L9-Fc; VH3-L6-VH4-L7-VL4-L8-VL3-L9-Fc; VL3-L6-VL4-L7-VH4-L8-VH3-L9- CH1; VH3-L6-VH4-L7-VL4-L8-VL3-L9-CH1; VL3-L6-VL4-L7-VH4-L8-VH3-L9-CL; VH3-L6-VH4-L7-VL4-L8-VL3-L9-CL; VL3-L6-VL4-L7-VH4-L8-VH3-L9-CH1-L10-CL; VH3-L6-VH4-L7-VL4-L8-VL3-L9-CH1-L10-CL; VL3-L6-VL4-L7-VH4-L8-VH3-L9-CL-L10-CH1; VH3-L6-VH4-L7-VL4-L8-VL3-L9-CL-L10-CH1; VL3-L6-VL4-L7-VH4-L8-VH3-L9-CH1-Fc; VH3-L6-VH4-L7-VL4-L8-VL3-L9-CH1-Fc; VL3-L6-VL4-L7-VH4-L8-VH3-L9-CL-Fc; VH3-L6-VH4-L7-VL4-L8-VL3-L9-CL-Fc; VL3-L6-VL4-L7-VH4-L8-VH3-L9-CH1-L10-CL-Fc; VH3-L6-VH4-L7-VL4-L8-VL3-L9-CH1-L10-CL-Fc; VL3-L6-VL4-L7-VH4-L8-VH3-L9-CL-L10-CH1-Fc; VH3-L6-VH4-L7-VL4-L8-VL3-L9-CL-L10-CH1-Fc; VL3-L6-VL4-L7-VH4-L8-VH3-L9-CH1-L10-Fc; VH3-L6-VH4-L7-VL4-L8-VL3-L9-CH1-L10-Fc; VL3-L6-VL4-L7-VH4-L8-VH3-L9-CL-L10-Fc; VH3-L6-VH4-L7-VL4-L8-VL3-L9-CL-L10-Fc; VL3-L6-VL4-L7-VH4-L8-VH3-L9-CH1-L10-CL-L11-Fc; VH3-L6-VH4-L7-VL4-L8-VL3-L9-CH1-L10-CL-L11-Fc; VL3-L6-VL4-L7-VH4-L8-VH3-L9-CL-L10-CH1-L11-Fc; or VH3-L6-VH4-L7-VL4-L8-VL3-L9-CL-L10-CH1-L11-Fc. In some aspects, the first polypeptide has a structure represented by VH1-L1-VH2-L2-VL2-L3-VL1-L4-CH1-Fc, and the second polypeptide has a structure represented by VL3-VL4-VH4-VH3; VH3-VH4-VL4-VL3; VL3-VL4-VH4-VH3-Fc; VH3-VH4-VL4-VL3-Fc; VL3-VL4-VH4-VH3-CH1; VH3-VH4-VL4-VL3-CH1; VL3-VL4-VH4-VH3-CL; VH3-VH4-VL4-VL3-CL; VL3-VL4-VH4-VH3-CH1-CL; VH3-VH4-VL4-VL3-CH1-CL; VL3-VL4-VH4-VH3-CL-CH1; VH3-VH4-VL4-VL3-CL-CH1; VL3-VL4-VH4-VH3-CH1-Fc; VH3-VH4-VL4-VL3-CH1-Fc; VL3-VL4-VH4-VH3-CL-Fc; VH3-VH4-VL4-VL3-CL-Fc; VL3-VL4-VH4-VH3-CH1-CL-Fc; VH3-VH4-VL4-VL3-CH1-CL-Fc; VL3-VL4-VH4-VH3-CL-CH1-Fc; VH3-VH4-VL4-VL3-CL-CH1-Fc; VL3-L6-VL4-L7-VH4-L8-VH3; VH3-L6-VH4-L7-VL4-L8-VL3; VL3-L6-VL4-L7-VH4-L8-VH3-Fc; VH3-L6-VH4-L7-VL4-L8-VL3-Fc; VL3-L6-VL4-L7-VH4-L8-VH3-L9-Fc; VH3-L6-VH4-L7-VL4-L8-VL3-L9-Fc; VL3-L6-VL4-L7-VH4-L8-VH3-L9-CH1; VH3-L6-VH4-L7-VL4-L8-VL3-L9-CH1; VL3-L6-VL4-L7-VH4-L8-VH3-L9-CL; VH3-L6-VH4-L7-VL4-L8-VL3-L9-CL; VL3-L6-VL4-L7-VH4-L8-VH3- L9-CH1-L10-CL; VH3-L6-VH4-L7-VL4-L8-VL3-L9-CH1-L10-CL; VL3-L6-VL4-L7-VH4-L8-VH3-L9-CL-L10-CH1; VH3-L6-VH4-L7-VL4-L8-VL3-L9-CL-L10-CH1; VL3-L6-VL4-L7-VH4-L8-VH3-L9-CH1-Fc; VH3-L6-VH4-L7-VL4-L8-VL3-L9-CH1-Fc; VL3-L6-VL4-L7-VH4-L8-VH3-L9-CL-Fc; VH3-L6-VH4-L7-VL4-L8-VL3-L9-CL-Fc; VL3-L6-VL4-L7-VH4-L8-VH3-L9-CH1-L10-CL-Fc; VH3-L6-VH4-L7-VL4-L8-VL3-L9-CH1-L10-CL-Fc; VL3-L6-VL4-L7-VH4-L8-VH3-L9-CL-L10-CH1-Fc; VH3-L6-VH4-L7-VL4-L8-VL3-L9-CL-L10-CH1-Fc; VL3-L6-VL4-L7-VH4-L8-VH3-L9-CH1-L10-Fc; VH3-L6-VH4-L7-VL4-L8-VL3-L9-CH1-L10-Fc; VL3-L6-VL4-L7-VH4-L8-VH3-L9-CL-L10-Fc; VH3-L6-VH4-L7-VL4-L8-VL3-L9-CL-L10-Fc; VL3-L6-VL4-L7-VH4-L8-VH3-L9-CH1-L10-CL-L11-Fc; VH3-L6-VH4-L7-VL4-L8-VL3-L9-CH1-L10-CL-L11-Fc; VL3-L6-VL4-L7-VH4-L8-VH3-L9-CL-L10-CH1-L11-Fc; or VH3-L6-VH4-L7-VL4-L8-VL3-L9-CL-L10-CH1-L11-Fc. In some aspects, the first polypeptide has a structure represented by VL1-L1-VL2-L2-VH2-L3-VH1-L4-CL-Fc, and the second polypeptide has a structure represented by VL3-VL4-VH4-VH3; VH3-VH4-VL4-VL3; VL3-VL4-VH4-VH3-Fc; VH3-VH4-VL4-VL3-Fc; VL3-VL4-VH4-VH3-CH1; VH3-VH4-VL4-VL3-CH1; VL3-VL4-VH4-VH3-CL; VH3-VH4-VL4-VL3-CL; VL3-VL4-VH4-VH3-CH1-CL; VH3-VH4-VL4-VL3-CH1-CL; VL3-VL4-VH4-VH3-CL-CH1; VH3-VH4-VL4-VL3-CL-CH1; VL3-VL4-VH4-VH3-CH1-Fc; VH3-VH4-VL4-VL3-CH1-Fc; VL3-VL4-VH4-VH3-CL-Fc; VH3-VH4-VL4-VL3-CL-Fc; VL3-VL4-VH4-VH3-CH1-CL-Fc; VH3-VH4-VL4-VL3-CH1-CL-Fc; VL3-VL4-VH4-VH3-CL-CH1-Fc; VH3-VH4-VL4-VL3-CL-CH1-Fc; VL3-L6-VL4-L7-VH4-L8-VH3; VH3-L6-VH4-L7-VL4-L8-VL3; VL3-L6-VL4-L7-VH4-L8-VH3-Fc; VH3-L6-VH4-L7-VL4-L8-VL3-Fc; VL3-L6-VL4-L7-VH4-L8-VH3-L9-Fc; VH3-L6-VH4-L7-VL4-L8-VL3-L9-Fc; VL3-L6-VL4-L7-VH4-L8-VH3-L9-CH1; VH3-L6-VH4-L7-VL4-L8-VL3-L9-CH1; VL3-L6-VL4-L7-VH4-L8-VH3-L9-CL; VH3-L6-VH4-L7-VL4-L8-VL3-L9-CL; VL3-L6-VL4-L7-VH4-L8-VH3-L9-CH1-L10-CL; VH3-L6-VH4-L7-VL4- L8-VL3-L9-CH1-L10-CL; VL3-L6-VL4-L7-VH4-L8-VH3-L9-CL-L10-CH1; VH3-L6-VH4-L7-VL4-L8-VL3-L9-CL-L10-CH1; VL3-L6-VL4-L7-VH4-L8-VH3-L9-CH1-Fc; VH3-L6-VH4-L7-VL4-L8-VL3-L9-CH1-Fc; VL3-L6-VL4-L7-VH4-L8-VH3-L9-CL-Fc; VH3-L6-VH4-L7-VL4-L8-VL3-L9-CL-Fc; VL3-L6-VL4-L7-VH4-L8-VH3-L9-CH1-L10-CL-Fc; VH3-L6-VH4-L7-VL4-L8-VL3-L9-CH1-L10-CL-Fc; VL3-L6-VL4-L7-VH4-L8-VH3-L9-CL-L10-CH1-Fc; VH3-L6-VH4-L7-VL4-L8-VL3-L9-CL-L10-CH1-Fc; VL3-L6-VL4-L7-VH4-L8-VH3-L9-CH1-L10-Fc; VH3-L6-VH4-L7-VL4-L8-VL3-L9-CH1-L10-Fc; VL3-L6-VL4-L7-VH4-L8-VH3-L9-CL-L10-Fc; VH3-L6-VH4-L7-VL4-L8-VL3-L9-CL-L10-Fc; VL3-L6-VL4-L7-VH4-L8-VH3-L9-CH1-L10-CL-L11-Fc; VH3-L6-VH4-L7-VL4-L8-VL3-L9-CH1-L10-CL-L11-Fc; VL3-L6-VL4-L7-VH4-L8-VH3-L9-CL-L10-CH1-L11-Fc; or VH3-L6-VH4-L7-VL4-L8-VL3-L9-CL-L10-CH1-L11-Fc. In some aspects, the first polypeptide has a structure represented by VH1-L1-VH2-L2-VL2-L3-VL1-L4-CL-Fc, and the second polypeptide has a structure represented by VL3-VL4-VH4-VH3; VH3-VH4-VL4-VL3; VL3-VL4-VH4-VH3-Fc; VH3-VH4-VL4-VL3-Fc; VL3-VL4-VH4-VH3-CH1; VH3-VH4-VL4-VL3-CH1; VL3-VL4-VH4-VH3-CL; VH3-VH4-VL4-VL3-CL; VL3-VL4-VH4-VH3-CH1-CL; VH3-VH4-VL4-VL3-CH1-CL; VL3-VL4-VH4-VH3-CL-CH1; VH3-VH4-VL4-VL3-CL-CH1; VL3-VL4-VH4-VH3-CH1-Fc; VH3-VH4-VL4-VL3-CH1-Fc; VL3-VL4-VH4-VH3-CL-Fc; VH3-VH4-VL4-VL3-CL-Fc; VL3-VL4-VH4-VH3-CH1-CL-Fc; VH3-VH4-VL4-VL3-CH1-CL-Fc; VL3-VL4-VH4-VH3-CL-CH1-Fc; VH3-VH4-VL4-VL3-CL-CH1-Fc; VL3-L6-VL4-L7-VH4-L8-VH3; VH3-L6-VH4-L7-VL4-L8-VL3; VL3-L6-VL4-L7-VH4-L8-VH3-Fc; VH3-L6-VH4-L7-VL4-L8-VL3-Fc; VL3-L6-VL4-L7-VH4-L8-VH3-L9-Fc; VH3-L6-VH4-L7-VL4-L8-VL3-L9-Fc; VL3-L6-VL4-L7-VH4-L8-VH3-L9-CH1; VH3-L6- VH4-L7-VL4-L8-VL3-L9-CH1; VL3-L6-VL4-L7-VH4-L8-VH3-L9-CL; VH3-L6-VH4-L7-VL4-L8-VL3-L9-CL; VL3- L6-VL4-L7-VH4-L8-VH3-L9-CH1-L10-CL; VH3-L6-VH4-L7-VL4-L8-VL3-L9-CH1-L10-CL; VL3-L6-VL4-L7-VH4-L8-VH3-L9-CL-L10-CH1; VH3-L6-VH4-L7-VL4-L8-VL3-L9-CL-L10-CH1; VL3-L6-VL4-L7-VH4-L8-VH3-L9-CH1-Fc; VH3-L6-VH4-L7-VL4-L8-VL3-L9-CH1-Fc; VL3-L6-VL4-L7-VH4-L8-VH3-L9-CL-Fc; VH3-L6-VH4-L7-VL4-L8-VL3-L9-CL-Fc; VL3-L6-VL4-L7-VH4-L8-VH3-L9-CH1-L10-CL-Fc; VH3-L6-VH4-L7-VL4-L8-VL3-L9-CH1-L10-CL-Fc; VL3-L6-VL4-L7-VH4-L8-VH3-L9-CL-L10-CH1-Fc; VH3-L6-VH4-L7-VL4-L8-VL3-L9-CL-L10-CH1-Fc; VL3-L6-VL4-L7-VH4-L8-VH3-L9-CH1-L10-Fc; VH3-L6-VH4-L7-VL4-L8-VL3-L9-CH1-L10-Fc; VL3-L6-VL4- L7-VH4-L8-VH3-L9-CL-L10-Fc; VH3-L6-VH4-L7-VL4-L8-VL3-L9-CL-L10-Fc; VL3-L6-VL4-L7-VH4-L8-VH3-L9-CH1-L10-CL-L11-Fc; VH3-L6-VH4-L7-VL4-L8-VL3-L9-CH1-L10-CL-L11-Fc; VL3-L6-VL4-L7-VH4-L8-VH3-L9-CL-L10-CH1-L11-Fc; or VH3-L6-VH4-L7-VL4-L8-VL3-L9-CL-L10-CH1-L11-Fc. In some aspects, the first polypeptide has a structure represented by VL1-L1-VL2-L2-VH2-L3-VH1-L4-CH1-L5-CL-Fc, and the second polypeptide has a structure represented by VL3-VL4-VH4-VH3; VH3-VH4-VL4-VL3; VL3-VL4-VH4-VH3-Fc; VH3-VH4-VL4-VL3-Fc; VL3-VL4-VH4-VH3-CH1; VH3-VH4-VL4-VL3-CH1; VL3-VL4-VH4-VH3-CL; VH3-VH4-VL4-VL3-CL; VL3-VL4-VH4-VH3-CH1-CL; VH3-VH4-VL4-VL3-CH1-CL; VL3-VL4-VH4-VH3-CL-CH1; VH3-VH4-VL4-VL3-CL-CH1; VL3-VL4-VH4-VH3-CH1-Fc; VH3-VH4-VL4-VL3-CH1-Fc; VL3-VL4-VH4-VH3-CL-Fc; VH3-VH4-VL4-VL3-CL-Fc; VL3-VL4-VH4-VH3-CH1-CL-Fc; VH3-VH4-VL4-VL3-CH1-CL-Fc; VL3-VL4-VH4-VH3-CL-CH1-Fc; VH3-VH4-VL4-VL3-CL-CH1-Fc; VL3-L6-VL4-L7-VH4-L8-VH3; VH3-L6-VH4-L7-VL4-L8-VL3; VL3-L6-VL4-L7-VH4-L8-VH3-Fc; VH3-L6-VH4-L7-VL4-L8-VL3-Fc; VL3-L6-VL4-L7-VH4-L8-VH3-L9-Fc; VH3-L6-VH4-L7-VL4-L8-VL3-L9-Fc; VL3-L6-VL4-L7-VH4-L8-VH3-L9-CH1; VH3-L6-VH4-L7-VL4-L8-VL3-L9-CH1; VL3-L6-VL4-L7-VH4-L8-VH3-L9-CL; VH3-L6-VH4-L7-VL4-L8-VL3-L9-CL; VL3-L6-VL4-L7-VH4-L8-VH3- L9-CH1-L10-CL; VH3-L6-VH4-L7-VL4-L8-VL3-L9-CH1-L10-CL; VL3-L6-VL4-L7-VH4-L8-VH3-L9-CL-L10-CH1; VH3-L6-VH4-L7-VL4-L8-VL3-L9-CL-L10-CH1; VL3-L6-VL4-L7-VH4-L8-VH3-L9-CH1-Fc; VH3-L6-VH4-L7-VL4-L8-VL3-L9-CH1-Fc; VL3-L6-VL4-L7-VH4-L8-VH3-L9-CL-Fc; VH3-L6-VH4-L7-VL4-L8-VL3-L9-CL-Fc; VL3-L6-VL4-L7-VH4-L8-VH3-L9-CH1-L10-CL-Fc; VH3-L6-VH4-L7-VL4-L8-VL3-L9-CH1-L10-CL-Fc; VL3-L6-VL4-L7-VH4-L8-VH3-L9-CL-L10-CH1-Fc; VH3-L6-VH4-L7-VL4-L8-VL3-L9-CL-L10-CH1-Fc; VL3-L6-VL4-L7-VH4-L8-VH3-L9-CH1-L10-Fc; VH3-L6-VH4-L7-VL4-L8-VL3-L9-CH1-L10-Fc; VL3-L6-VL4-L7-VH4-L8-VH3-L9-CL-L10-Fc; VH3-L6-VH4-L7-VL4-L8-VL3-L9-CL-L10-Fc; VL3-L6-VL4-L7-VH4-L8-VH3-L9-CH1-L10-CL-L11-Fc; VH3-L6-VH4-L7-VL4-L8-VL3-L9-CH1-L10-CL-L11-Fc; VL3-L6-VL4-L7-VH4-L8-VH3-L9-CL-L10-CH1-L11-Fc; or VH3-L6-VH4-L7-VL4-L8-VL3-L9-CL-L10-CH1-L11-Fc. In some aspects, the first polypeptide has a structure represented by VH1-L1-VH2-L2-VL2-L3-VL1-L4-CH1-L5-CL-Fc, and the second polypeptide has a structure represented by VL3-VL4-VH4-VH3; VH3-VH4-VL4-VL3; VL3-VL4-VH4-VH3-Fc; VH3-VH4-VL4-VL3-Fc; VL3-VL4-VH4-VH3-CH1; VH3-VH4-VL4-VL3-CH1; VL3-VL4-VH4-VH3-CL; VH3-VH4-VL4-VL3-CL; VL3-VL4-VH4-VH3-CH1-CL; VH3-VH4-VL4-VL3-CH1-CL; VL3-VL4-VH4-VH3-CL-CH1; VH3-VH4-VL4-VL3-CL-CH1; VL3-VL4-VH4-VH3-CH1-Fc; VH3-VH4-VL4-VL3-CH1-Fc; VL3-VL4-VH4-VH3-CL-Fc; VH3-VH4-VL4-VL3-CL-Fc; VL3-VL4-VH4-VH3-CH1-CL-Fc; VH3-VH4-VL4-VL3-CH1-CL-Fc; VL3-VL4-VH4-VH3-CL-CH1-Fc; VH3-VH4-VL4-VL3-CL-CH1-Fc; VL3-L6-VL4-L7-VH4-L8-VH3; VH3-L6-VH4-L7-VL4-L8-VL3; VL3-L6-VL4-L7-VH4-L8-VH3-Fc; VH3-L6-VH4-L7-VL4-L8-VL3-Fc; VL3-L6-VL4-L7-VH4-L8-VH3-L9-Fc; VH3-L6-VH4-L7-VL4-L8-VL3-L9-Fc; VL3-L6-VL4-L7-VH4-L8-VH3-L9-CH1; VH3-L6-VH4-L7-VL4-L8-VL3-L9-CH1; VL3-L6-VL4-L7- VH4-L8-VH3-L9-CL; VH3-L6-VH4-L7-VL4-L8-VL3-L9-CL; VL3-L6-VL4-L7-VH4-L8-VH3-L9-CH1-L10-CL; VH3-L6-VH4-L7-VL4-L8-VL3-L9-CH1-L10-CL; VL3-L6-VL4-L7-VH4-L8-VH3-L9-CL-L10-CH1; VH3-L6-VH4-L7-VL4-L8-VL3-L9-CL-L10-CH1; VL3-L6-VL4-L7-VH4-L8-VH3-L9-CH1-Fc; VH3-L6-VH4-L7-VL4-L8-VL3-L9-CH1-Fc; VL3-L6-VL4-L7-VH4-L8-VH3-L9-CL-Fc; VH3-L6-VH4-L7-VL4-L8-VL3-L9-CL-Fc; VL3-L6-VL4-L7-VH4-L8-VH3-L9-CH1-L10-CL-Fc; VH3-L6-VH4-L7-VL4-L8-VL3-L9-CH1-L10-CL-Fc; VL3-L6-VL4-L7-VH4-L8-VH3-L9-CL-L10-CH1-Fc; VH3-L6-VH4-L7-VL4-L8-VL3-L9-CL-L10-CH1-Fc; VL3-L6-VL4-L7-VH4-L8-VH3-L9-CH1-L10-Fc; VH3-L6-VH4-L7-VL4-L8-VL3-L9-CH1-L10-Fc; VL3-L6-VL4-L7-VH4-L8-VH3-L9-CL-L10-Fc; VH3-L6-VH4-L7-VL4-L8-VL3-L9-CL-L10-Fc; VL3-L6-VL4-L7-VH4-L8-VH3-L9-CH1-L10-CL-L11-Fc; VH3-L6-VH4-L7-VL4-L8-VL3-L9-CH1-L10-CL-L11-Fc; VL3-L6-VL4-L7-VH4-L8-VH3-L9-CL-L10-CH1-L11-Fc; or VH3-L6-VH4-L7-VL4-L8-VL3-L9-CL-L10-CH1-L11-Fc. In some aspects, the first polypeptide has a structure represented by VL1-L1-VL2-L2-VH2-L3-VH1-L4-CL-L5-CH1-Fc, and the second polypeptide has a structure represented by VL3-VL4-VH4-VH3; VH3-VH4-VL4-VL3; VL3-VL4-VH4-VH3-Fc; VH3-VH4-VL4-VL3-Fc; VL3-VL4-VH4-VH3-CH1; VH3-VH4-VL4-VL3-CH1; VL3-VL4-VH4-VH3-CL; VH3-VH4-VL4-VL3-CL; VL3-VL4-VH4-VH3-CH1-CL; VH3-VH4-VL4-VL3-CH1-CL; VL3-VL4-VH4-VH3-CL-CH1; VH3-VH4-VL4-VL3-CL-CH1; VL3-VL4-VH4-VH3-CH1-Fc; VH3-VH4-VL4-VL3-CH1-Fc; VL3-VL4-VH4-VH3-CL-Fc; VH3-VH4-VL4-VL3-CL-Fc; VL3-VL4-VH4-VH3-CH1-CL-Fc; VH3-VH4-VL4-VL3-CH1-CL-Fc; VL3-VL4-VH4-VH3-CL-CH1-Fc; VH3-VH4-VL4-VL3-CL-CH1-Fc; VL3-L6-VL4-L7-VH4-L8-VH3; VH3-L6-VH4-L7-VL4-L8-VL3; VL3-L6-VL4-L7-VH4-L8-VH3-Fc; VH3-L6-VH4-L7-VL4- L8-VL3-Fe; VL3-L6-VL4-L7-VH4-L8-VH3-L9-Fc; VH3-L6-VH4-L7-VL4-L8-VL3-L9-Fc; VL3-L6-VL4-L7-VH4-L8-VH3-L9-CH1; VH3-L6-VH4-L7-VL4-L8-VL3-L9-CH1; VL3-L6-VL4-L7-VH4-L8-VH3-L9-CL; VH3-L6-VH4- L7-VL4-L8-VL3-L9-CL; VL3-L6-VL4-L7-VH4-L8-VH3-L9-CH1-L10-CL; VH3-L6-VH4-L7-VL4-L8-VL3-L9-CH1- L10-CL; VL3-L6-VL4-L7-VH4-L8-VH3-L9-CL-L10-CH1; VH3-L6-VH4-L7-VL4-L8-VL3-L9-CL-L10-CH1; VL3-L6-VL4-L7-VH4-L8-VH3-L9-CH1-Fc; VH3-L6-VH4-L7-VL4-L8-VL3-L9-CH1-Fc; VL3-L6-VL4-L7-VH4-L8-VH3- L9-CL-Fc; VH3-L6-VH4-L7-VL4-L8-VL3-L9-CL-Fc; VL3-L6-VL4-L7-VH4-L8-VH3-L9-CH1-L10-CL-Fc; VH3-L6-VH4-L7-VL4-L8-VL3-L9-CH1-L10-CL-Fc; VL3-L6-VL4-L7-VH4-L8-VH3-L9-CL-L10-CH1-Fc; VH3-L6-VH4-L7-VL4-L8-VL3-L9-CL-L10-CH1-Fc; VL3-L6-VL4-L7-VH4-L8-VH3-L9-CH1-L10-Fc; VH3-L6-VH4-L7-VL4-L8-VL3-L9-CH1-L10-Fc; VL3-L6-VL4-L7-VH4-L8-VH3-L9-CL-L10-Fc; VH3-L6-VH4-L7-VL4-L8-VL3-L9-CL-L10-Fc; VL3-L6-VL4-L7-VH4-L8-VH3-L9-CH1-L10-CL-L11-Fc; VH3-L6-VH4-L7-VL4-L8-VL3-L9-CH1-L10-CL-L11-Fc; VL3-L6-VL4-L7-VH4-L8-VH3-L9-CL-L10-CH1-L11-Fc; or VH3-L6-VH4-L7-VL4-L8-VL3-L9-CL-L10-CH1-L11-Fc. In some aspects, the first polypeptide has a structure represented by VH1-L1-VH2-L2-VL2-L3-VL1-L4-CL-L5-CH1-Fc, and the second polypeptide has a structure represented by VL3-VL4-VH4-VH3; VH3-VH4-VL4-VL3; VL3-VL4-VH4-VH3-Fc; VH3-VH4-VL4-VL3-Fc; VL3-VL4-VH4-VH3-CH1; VH3-VH4-VL4-VL3-CH1; VL3-VL4-VH4-VH3-CL; VH3-VH4-VL4-VL3-CL; VL3-VL4-VH4-VH3-CH1-CL; VH3-VH4-VL4-VL3-CH1-CL; VL3-VL4-VH4-VH3-CL-CH1; VH3-VH4-VL4-VL3-CL-CH1; VL3-VL4-VH4-VH3-CH1-Fc; VH3-VH4-VL4-VL3-CH1-Fc; VL3-VL4-VH4-VH3-CL-Fc; VH3-VH4-VL4-VL3-CL-Fc; VL3-VL4-VH4-VH3-CH1-CL-Fc; VH3-VH4-VL4-VL3-CH1-CL-Fc; VL3-VL4-VH4-VH3-CL-CH1-Fc; VH3-VH4-VL4-VL3-CL-CH1-Fc; VL3-L6-VL4-L7-VH4-L8-VH3; VH3-L6-VH4-L7-VL4-L8-VL3; VL3-L6-VL4-L7-VH4-L8-VH3-Fc; VH3-L6-VH4-L7-VL4-L8-VL3-Fc; VL3-L6-VL4-L7-VH4-L8-VH3-L9-Fc; VH3-L6-VH4-L7-VL4-L8-VL3-L9-Fc; VL3-L6-VL4-L7-VH4-L8-VH3-L9-CH1; VH3-L6- VH4-L7-VL4-L8-VL3-L9-CH1; VL3-L6-VL4-L7-VH4-L8-VH3-L9-CL; VH3-L6-VH4-L7-VL4-L8-VL3-L9-CL; VL3- L6-VL4-L7-VH4-L8-VH3-L9-CH1-L10-CL; VH3-L6-VH4-L7-VL4-L8-VL3-L9-CH1-L10-CL; VL3-L6-VL4-L7-VH4-L8-VH3-L9-CL-L10-CH1; VH3-L6-VH4-L7-VL4-L8-VL3-L9-CL-L10-CH1; VL3-L6-VL4-L7-VH4-L8-VH3-L9-CH1-Fc; VH3-L6-VH4-L7-VL4-L8-VL3-L9-CH1-Fc; VL3-L6-VL4-L7-VH4-L8-VH3-L9-CL-Fc; VH3-L6-VH4-L7-VL4-L8-VL3-L9-CL-Fc; VL3-L6-VL4-L7-VH4-L8-VH3-L9-CH1-L10-CL-Fc; VH3-L6-VH4-L7-VL4-L8-VL3-L9-CH1-L10-CL-Fc; VL3-L6-VL4-L7-VH4-L8-VH3-L9-CL-L10-CH1-Fc; VH3-L6-VH4-L7-VL4-L8-VL3-L9-CL-L10-CH1-Fc; VL3-L6-VL4-L7-VH4-L8-VH3-L9-CH1-L10-Fc; VH3-L6-VH4-L7-VL4-L8-VL3-L9-CH1-L10-Fc; VL3-L6-VL4- L7-VH4-L8-VH3-L9-CL-L10-Fc; VH3-L6-VH4-L7-VL4-L8-VL3-L9-CL-L10-Fc; VL3-L6-VL4-L7-VH4-L8-VH3-L9-CH1-L10-CL-L11-Fc; VH3-L6-VH4-L7-VL4-L8-VL3-L9-CH1-L10-CL-L11-Fc; VL3-L6-VL4-L7-VH4-L8-VH3-L9-CL-L10-CH1-L11-Fc; or VH3-L6-VH4-L7-VL4-L8-VL3-L9-CL-L10-CH1-L11-Fc.

[0303] In some aspects of an antigen binding polypeptide or antigen binding polypeptide complex of the invention, VH1, VH2, VH3 and VH4 each comprise a heavy chain variable region from the PGT121, VRC01, 10E8v4 or PG16 antibody or a variant thereof; and/or VL1, VL2, VL3 and VL4 each comprise a light chain variable region from the PGT121, VRC01, 10E8v4 or PG16 antibody or a variant thereof.

[0304] In some aspects, VH1, VH2, VH3 and VH4 of an antigen binding polypeptide or antigen binding polypeptide complex of the invention each comprise an amino acid sequence having at least 90% identity, at least 95% identity or 100% identity to any one of SEQ ID NOs:338-341; and/or VL1, VL2, VL3 and VL4 each comprise an amino acid sequence having at least 90% identity, at least 95% identity or 100% identity to any one of SEQ ID NOs:342-345. For example, the VH1, VH2, VH3 and VH4 of an antigen binding polypeptide or antigen binding polypeptide complex of the invention may each comprise an amino acid sequence having at least 90% identity (such as at least 91%, 92%, 93%, 94%, 95%, 96%, 97%, 98%, or 99% identity) to any one of SEQ ID NOs:338-341; and/or VL1, VL2, VL3 and VL4 may each comprise an amino acid sequence having at least 90% identity (such as at least 91%, 92%, 93%, 94%, 95%, 96%, 97%, 98%, or 99% identity) to any one of SEQ ID NOs:342-345. For example, the VH1, VH2, VH3 and VH4 of an antigen binding polypeptide or antigen binding polypeptide complex of the invention may each comprise the amino acid sequence of any one of SEQ ID NOs:338-341; and/or VL1, VL2, VL3 and VL4 may each comprise the amino acid sequence of any one of SEQ ID NOs:342-345. For example, the VH1, VH2, VH3 and VH4 of an antigen binding polypeptide or antigen binding polypeptide complex of the invention may each comprise the amino acid sequence of any one of SEQ ID NOs:338-341. For example, the VL1, VL2, VL3 and VL4 may each comprise the amino acid sequence of any one of SEQ ID NOs:342-345. For example, the VH1, VH2, VH3 and VH4 of an antigen binding polypeptide or antigen binding polypeptide complex of the invention may each comprise the amino acid sequence of any one of SEQ ID NOs:338-341; and the VL1, VL2, VL3 and VL4 may each comprise the amino acid sequence of any one of SEQ ID NOs:342-345. In some aspects, the heavy chain CDR1 of an antigen binding polypeptide or antigen binding polypeptide complex of the invention comprises an amino acid sequence having at least 90% identity, at least 95% identity or 100% identity to any one of SEQ ID NOs:362, 365, 368 and 371; the heavy chain CDR2 of an antigen binding polypeptide or antigen binding polypeptide complex of the invention comprises an amino acid sequence having at least 90% identity, at least 95% identity or 100% identity to any one of SEQ ID NOs:363, 366, 369 and 372; the heavy chain CDR3 of an antigen binding polypeptide or antigen binding polypeptide complex of the invention comprises an amino acid sequence having at least 90% identity, at least 95% identity or 100% identity to any one of SEQ ID NOs:364, 367, 370 and 373; the light chain CDR1 of an antigen binding polypeptide or antigen binding polypeptide complex of the invention comprises an amino acid sequence having at least 90% identity, at least 95% identity or 100% identity to any one of SEQ ID NOs:374, 378, 381 and 384; the light chain CDR2 of an antigen binding polypeptide or antigen binding polypeptide complex of the invention comprises an amino acid sequence having at least 90% identity, at least 95% identity or 100% identity to any one of SEQ ID NOs:375, 379, 382 and 385; and/or the light chain CDR3 of an antigen binding polypeptide or antigen binding polypeptide complex of the invention comprises an amino acid sequence having at least 90% identity, at least 95% identity or 100% identity to any one of SEQ ID NOs:376, 380, 383 and 386. For example, the heavy chain CDR1 of an antigen binding polypeptide or antigen binding polypeptide complex of the invention comprises an amino acid sequence having at least 90% identity (such as at least 91%, 92%, 93%, 94%, 95%, 96%, 97%, 98%, or 99% identity) to any one of SEQ ID NOs:362, 365, 368 and 371; the heavy chain CDR2 of an antigen binding polypeptide or antigen binding polypeptide complex of the invention comprises an amino acid sequence having at least 90% identity (such as at least 91%, 92%, 93%, 94%, 95%, 96%, 97%, 98%, or 99% identity) to any one of SEQ ID NOs:363, 366, 369 and 372; the heavy chain CDR3 of an antigen binding polypeptide or antigen binding polypeptide complex of the invention comprises an amino acid sequence having at least 90% identity (such as at least 91%, 92%, 93%, 94%, 95%, 96%, 97%, 98%, or 99% identity) to any one of SEQ ID NOs:364, 367, 370 and 373; the light chain CDR1 of an antigen binding polypeptide or antigen binding polypeptide complex of the invention comprises an amino acid sequence having at least 90% identity (such as at least 91%, 92%, 93%, 94%, 95%, 96%, 97%, 98%, or 99% identity) to any one of SEQ ID NOs:374, 378, 381 and 384; the light chain CDR2 of an antigen binding polypeptide or antigen binding polypeptide complex of the invention comprises an amino acid sequence having at least 90% identity (such as at least 91%, 92%, 93%, 94%, 95%, 96%, 97%, 98%, or 99% identity) to any one of SEQ ID NOs:375, 379, 382 and 385; and/or the light chain CDR3 of an antigen binding polypeptide or antigen binding polypeptide complex of the invention comprises an amino acid sequence having at least 90% identity (such as at least 91%, 92%, 93%, 94%, 95%, 96%, 97%, 98%, or 99% identity) to any one of SEQ ID NOs:376, 380, 383 and 386. For example, the heavy chain CDR1 of an antigen binding polypeptide or antigen binding polypeptide complex of the invention comprises the amino acid sequence of any one of SEQ ID NOs:362, 365, 368 and 371; the heavy chain CDR2 of an antigen binding polypeptide or antigen binding polypeptide complex of the invention comprises the amino acid sequence of any one of SEQ ID NOs:363, 366, 369 and 372; the heavy chain CDR3 of an antigen binding polypeptide or antigen binding polypeptide complex of the invention comprises the amino acid sequence of any one of SEQ ID NOs:364, 367, 370 and 373; the light chain CDR1 of an antigen binding polypeptide or antigen binding polypeptide complex of the invention comprises the amino acid sequence of any one of SEQ ID NOs:374, 378, 381 and 384; the light chain CDR2 of an antigen binding polypeptide or antigen binding polypeptide complex of the invention comprises the amino acid sequence of any one of SEQ ID NOs:375, 379, 382 and 385; and/or the light chain CDR3 of an antigen binding polypeptide or antigen binding polypeptide complex of the invention comprises the amino acid sequence of any one of SEQ ID NOs:376, 380, 383 and 386. For example, the heavy chain CDR1 of an antigen binding polypeptide or antigen binding polypeptide complex of the invention comprises the amino acid sequence of any one of SEQ ID NOs:362, 365, 368 and 371; the heavy chain CDR2 of an antigen binding polypeptide or antigen binding polypeptide complex of the invention comprises the amino acid sequence of any one of SEQ ID NOs:363, 366, 369 and 372; and the heavy chain CDR3 of an antigen binding polypeptide or antigen binding polypeptide complex of the invention comprises the amino acid sequence of any one of SEQ ID NOs:364, 367, 370 and 373. For example, the light chain CDR1 of an antigen binding polypeptide or antigen binding polypeptide complex of the invention comprises the amino acid sequence of any one of SEQ ID NOs:374, 378, 381 and 384; the light chain CDR2 of an antigen binding polypeptide or antigen binding polypeptide complex of the invention comprises the amino acid sequence of any one of SEQ ID NOs:375, 379, 382 and 385; and the light chain CDR3 of an antigen binding polypeptide or antigen binding polypeptide complex of the invention comprises the amino acid sequence of any one of SEQ ID NOs:376, 380, 383 and 386. For example, the heavy chain CDR1 of an antigen binding polypeptide or antigen binding polypeptide complex of the invention comprises the amino acid sequence of any one of SEQ ID NOs:362, 365, 368 and 371; the heavy chain CDR2 of an antigen binding polypeptide or antigen binding polypeptide complex of the invention comprises the amino acid sequence of any one of SEQ ID NOs:363, 366, 369 and 372; the heavy chain CDR3 of an antigen binding polypeptide or antigen binding polypeptide complex of the invention comprises the amino acid sequence of any one of SEQ ID NOs:364, 367, 370 and 373; the light chain CDR1 of an antigen binding polypeptide or antigen binding polypeptide complex of the invention comprises the amino acid sequence of any one of SEQ ID NOs:374, 378, 381 and 384; the light chain CDR2 of an antigen binding polypeptide or antigen binding polypeptide complex of the invention comprises the amino acid sequence of any one of SEQ ID NOs:375, 379, 382 and 385; and the light chain CDR3 of an antigen binding polypeptide or antigen binding polypeptide complex of the invention comprises the amino acid sequence of any one of SEQ ID NOs:376, 380, 383 and 386. For example, the heavy chain CDR1 of an antigen binding polypeptide or antigen binding polypeptide complex of the invention comprises the amino acid sequence of SEQ ID NO:362; the heavy chain CDR2 of an antigen binding polypeptide or antigen binding polypeptide complex of the invention comprises the amino acid sequence of SEQ ID NO:363; the heavy chain CDR3 of an antigen binding polypeptide or antigen binding polypeptide complex of the invention comprises the amino acid sequence of SEQ ID NO:364; the light chain CDR1 of an antigen binding polypeptide or antigen binding polypeptide complex of the invention comprises the amino acid sequence of SEQ ID NO:378; the light chain CDR2 of an antigen binding polypeptide or antigen binding polypeptide complex of the invention comprises the amino acid sequence of SEQ ID NO:379; and the light chain CDR3 of an antigen binding polypeptide or antigen binding polypeptide complex of the invention comprises the amino acid sequence of SEQ ID NO:380. For example, the heavy chain CDR1 of an antigen binding polypeptide or antigen binding polypeptide complex of the invention comprises the amino acid sequence of SEQ ID NO:365; the heavy chain CDR2 of an antigen binding polypeptide or antigen binding polypeptide complex of the invention comprises the amino acid sequence of SEQ ID NO:366; the heavy chain CDR3 of an antigen binding polypeptide or antigen binding polypeptide complex of the invention comprises the amino acid sequence of SEQ ID NO:367; the light chain CDR1 of an antigen binding polypeptide or antigen binding polypeptide complex of the invention comprises the amino acid sequence of SEQ ID NO:381; the light chain CDR2 of an antigen binding polypeptide or antigen binding polypeptide complex of the invention comprises the amino acid sequence of SEQ ID NO:382; and the light chain CDR3 of an antigen binding polypeptide or antigen binding polypeptide complex of the invention comprises the amino acid sequence of SEQ ID NO:383. For example, the heavy chain CDR1 of an antigen binding polypeptide or antigen binding polypeptide complex of the invention comprises the amino acid sequence of SEQ ID NO:368; the heavy chain CDR2 of an antigen binding polypeptide or antigen binding polypeptide complex of the invention comprises the amino acid sequence of SEQ ID NO:369; the heavy chain CDR3 of an antigen binding polypeptide or antigen binding polypeptide complex of the invention comprises the amino acid sequence of SEQ ID NO:370; the light chain CDR1 of an antigen binding polypeptide or antigen binding polypeptide complex of the invention comprises the amino acid sequence of SEQ ID NO:384; the light chain CDR2 of an antigen binding polypeptide or antigen binding polypeptide complex of the invention comprises the amino acid sequence of SEQ ID NO:385; and the light chain CDR3 of an antigen binding polypeptide or antigen binding polypeptide complex of the invention comprises the amino acid sequence of SEQ ID NO:386. For example, the heavy chain CDR1 of an antigen binding polypeptide or antigen binding polypeptide complex of the invention comprises the amino acid sequence of SEQ ID NO:371; the heavy chain CDR2 of an antigen binding polypeptide or antigen binding polypeptide complex of the invention comprises the amino acid sequence of SEQ ID NO:372; the heavy chain CDR3 of an antigen binding polypeptide or antigen binding polypeptide complex of the invention comprises the amino acid sequence of SEQ ID NO:373; the light chain CDR1 of an antigen binding polypeptide or antigen binding polypeptide complex of the invention comprises the amino acid sequence of SEQ ID NO:374; the light chain CDR2 of an antigen binding polypeptide or antigen binding polypeptide complex of the invention comprises the amino acid sequence of SEQ ID NO:375; and the light chain CDR3 of an antigen binding polypeptide or antigen binding polypeptide complex of the invention comprises the amino acid sequence of SEQ ID NO:376.

[0305] In some aspects, VH1, VH2, VH3 and VH4 of an antigen binding polypeptide or antigen binding polypeptide complex of the invention each comprise a CDR1 having an amino acid sequence with at least 90% identity, at least 95% identity or 100% identity to any one of SEQ ID NOs:362, 365, 368 and 371; a CDR2 having an amino acid sequence with at least 90% identity, at least 95% identity or 100% identity to any one of SEQ ID NOs:363, 366, 369 and 372; and a CDR3 having an amino acid sequence with at least 90% identity, at least 95% identity or 100% identity to any one of SEQ ID NOs:364, 367, 370 and 373; and VL1, VL2, VL3 and VL4 each comprise a CDR1 having an amino acid sequence with at least 90% identity, at least 95% identity or 100% identity to any one of SEQ ID NOs:374, 378, 381 and 384; a CDR2 having an amino acid sequence with at least 90% identity, at least 95% identity or 100% identity to any one of SEQ ID NOs:375, 379, 382 and 385; and a CDR3 having an amino acid sequence with at least 90% identity, at least 95% identity or 100% identity to any one of SEQ ID NOs:376, 380, 383 and 386. For example, the VH1, VH2, VH3 and VH4 of an antigen binding polypeptide or antigen binding polypeptide complex of the invention may each comprise a CDR1 having an amino acid sequence with at least 90% identity (such as at least 91%, 92%, 93%, 94%, 95%, 96%, 97%, 98%, or 99% identity) to any one of SEQ ID NOs:362, 365, 368 and 371; a CDR2 having an amino acid sequence with at least 90% identity (such as at least 91%, 92%, 93%, 94%, 95%, 96%, 97%, 98%, or 99% identity) to any one of SEQ ID NOs:363, 366, 369 and 372; and a CDR3 having an amino acid sequence with at least 90% identity (such as at least 91%, 92%, 93%, 94%, 95%, 96%, 97%, 98%, or 99% identity) to any one of SEQ ID NOs:364, 367, 370 and 373; and the VL1, VL2, VL3 and VL4 may each comprise a CDR1 having an amino acid sequence with at least 90% identity (such as at least 91%, 92%, 93%, 94%, 95%, 96%, 97%, 98%, or 99% identity) to any one of SEQ ID NOs:374, 378, 381 and 384; a CDR2 having an amino acid sequence with at least 90% identity (such as at least 91%, 92%, 93%, 94%, 95%, 96%, 97%, 98%, or 99% identity) to any one of SEQ ID NOs:375, 379, 382 and 385; and a CDR3 having an amino acid sequence with at least 90% identity (such as at least 91%, 92%, 93%, 94%, 95%, 96%, 97%, 98%, or 99% identity) to any one of SEQ ID NOs:376, 380, 383 and 386. For example, the VH1, VH2, VH3 and VH4 of an antigen binding polypeptide or antigen binding polypeptide complex of the invention may each comprise a CDR1 having the amino acid sequence of any one of SEQ ID NOs:362, 365, 368 and 371; a CDR2 having the amino acid sequence of any one of SEQ ID NOs:363, 366, 369 and 372; and a CDR3 having the amino acid sequence of any one of SEQ ID NOs:364, 367, 370 and 373; and the VL1, VL2, VL3 and VL4 may each comprise a CDR1 having the amino acid sequence of any one of SEQ ID NOs:374, 378, 381 and 384; a CDR2 having the amino acid sequence of any one of SEQ ID NOs:375, 379, 382 and 385; and a CDR3 having the amino acid sequence of any one of SEQ ID NOs:376, 380, 383 and 386.

[0306] In some aspects, the antigen binding polypeptides and antigen binding polypeptide complexes described herein specifically bind to an HIV protein. This includes specific binding to one or more HIV proteins and specific binding to one or more epitopes on the same HIV protein. In some aspects, the HIV protein is selected from the group consisting of an HIV envelope protein, an HIV structural protein, an HIV functional protein, or an HIV accessory protein. In some aspects, the HIV envelope protein is HIV envelope glycoprotein (Env), HIV envelope glycoprotein gp160, HIV envelope surface glycoprotein gp120, or HIV transmembrane envelope protein gp41. In some aspects, the HIV structural protein is p17, p24, p7 or p55. In some aspects, the HIV functional protein is p66, HIV-1 protease (PR) or p31. In some aspects, the HIV accessory protein is Nef, Tat, Rev, Vif, Vpr or Vpu.

[0307] Antigen binding sequences (e.g., CDR, VH, VL, heavy chain and light chain sequences from antibodies) for HIV proteins are well known. Such antibodies include, but are not limited to PGT145, PG9, PG16, PGT128, PGT121, 10-1074, 3BNC117, VRC01, PGT151, 4E10, 10E8, or a variant thereof (e.g., 10E8v4). In addition, molecular biology and recombinant DNA methods for making, screening and engineering antigen binding complexes and antibodies containing such sequences are well known and described, for example, in Adair et al Human Antibodies, 5(1-2):41-47, 1994; Kostelny et al., J. Immunol., 148(5):1547-1553 (1992), Shiraiwa et al., Methods, 154:10-20, 2019; and Zola, “Monoclonal Antibodies: A Manual of Techniques,” 1987, 1^{st} Ed., CRC Press; and Steinitz, Human Antibodies, 18(1-2):1-10, 2009.

[0308] In some aspects, an antigen binding polypeptide or antigen binding polypeptide complex of the invention does not specifically bind to an antigen associated with severe acute respiratory syndrome (SARS).

[0309] In some aspects, one or more of VH1, VH2, VH3 and VH4 of an antigen binding polypeptide or antigen binding polypeptide complex of the invention comprises an amino acid sequence encoded by a polynucleotide having at least 90% identity, at least 95% identity or 100% identity to SEQ ID NO:387 or 388; and/or one or more of VL1, VL2, VL3 and VL4 of an antigen binding polypeptide or antigen binding polypeptide complex of the invention comprises an amino acid sequence encoded by a polynucleotide having at least 90% identity, at least 95% identity or 100% identity to SEQ ID NO:389 or 390. For example, one or more of VH1, VH2, VH3 and VH4 of an antigen binding polypeptide or antigen binding polypeptide complex of the invention may comprise an amino acid sequence encoded by a polynucleotide having at least 90% identity to SEQ ID NO:387 or 388; and/or one or more of VL1, VL2, VL3 and VL4 of an antigen binding polypeptide or antigen binding polypeptide complex of the invention may comprise an amino acid sequence encoded by a polynucleotide having at least 90% identity to SEQ ID NO:389 or 390. At least 90% identity may include at least 91%, 92%, 93%, 94%, 95%, 96%, 97%, 98%, 99% or 100% identity to the reference polynucleotide sequence. For example, one or more of VH1, VH2, VH3 and VH4 of an antigen binding polypeptide or antigen binding polypeptide complex of the invention may comprise an amino acid sequence encoded by the polynucleotide shown in SEQ ID NO:387 or 388; and/or one or more of VL1, VL2, VL3 and VL4 of an antigen binding polypeptide or antigen binding polypeptide complex of the invention may comprise an amino acid sequence encoded by the polynucleotide shown in SEQ ID NO:389 or 390.

[0310] In some aspects, the invention is directed to an antigen binding polypeptide or antigen binding polypeptide complex (e.g., antibody or antigen binding fragment thereof) comprising one or more amino acid sequences having at least 90% identity, at least 95% identity, or 100% identity to any one of SEQ ID NOs:198-209, 346 and 348. For example, the antigen binding polypeptide or antigen binding polypeptide complex (e.g., antibody or antigen binding fragment thereof) may comprise one or more amino acid sequences having at least 90% (such as at least 91%, 92%, 93%, 94%, 95%, 96%, 97%, 98%, or 99%) identity to any one of SEQ ID NOs:198-209, 346 and 348. For example, the antigen binding polypeptide or antigen binding polypeptide complex (e.g., antibody or antigen binding fragment thereof) may comprise one or more amino acid sequences as shown in SEQ ID NOs:198-209, 346 and 348.

[0311] In other aspects, the invention is directed to an antigen binding polypeptide or antigen binding polypeptide complex (e.g., antibody or antigen binding fragment thereof) comprising one or more amino acid sequences encoded by a polynucleotide having at least 90% identity, at least 95% identity, or 100% identity to any one of SEQ ID NOs:347 and 349-361. For example, the antigen binding polypeptide or antigen binding polypeptide complex (e.g., antibody or antigen binding fragment thereof) may comprise one or more amino acid sequences encoded by a polynucleotide having at least 90% (such as at least 91%, 92%, 93%, 94%, 95%, 96%, 97%, 98%, or 99%) identity to any one of SEQ ID NOs:347 and 349-361. For example, the antigen binding polypeptide or antigen binding polypeptide complex (e.g., antibody or antigen binding fragment thereof) may comprise one or more amino acid sequences encoded by the polynucleotide shown in any one of SEQ ID NOs:347 and 349-361.

[0312] As used herein, an antigen binding polypeptide, antigen binding polypeptide complex (e.g., an antibody or antigen binding fragment thereof), or region or domain thereof that “specifically binds” refers to its association with an epitope by its antigen binding domain, and that the binding entails some complementarity between the antigen binding domain and the epitope. Specific binding to an epitope occurs where there is binding to that epitope via its antigen binding domain more readily than there would be binding to a random, unrelated epitope.

[0313] As used herein, an “epitope” refers to a localized region of an antigen to which an antigen binding polypeptide or antigen binding polypeptide complex (e.g., antibody or antigen binding fragment thereof) can specifically bind. An epitope can be, for example, contiguous amino acids of a polypeptide (linear or contiguous epitope) or an epitope can, for example, come together from two or more non-contiguous regions of a polypeptide or polypeptides (conformational, non-linear, discontinuous, or non-contiguous epitope). In some aspects, the epitope to which an antibody or antigen-binding fragment thereof binds can be determined by, e.g., NMR spectroscopy, X-ray diffraction crystallography studies, ELISA assays, hydrogen/deuterium exchange coupled with mass spectrometry (e.g., liquid chromatography electrospray mass spectrometry), array-based oligo-peptide scanning assays, and/or mutagenesis mapping (e.g., site-directed mutagenesis mapping). See, e.g., Giegé R et al., (1994) Acta Crystallogr D Biol Crystallogr 50(Pt 4): 339-350; McPherson A (1990) Eur J Biochem 189: 1-23; Chayen N E (1997) Structure 5: 1269-1274; McPherson A (1976) J Biol Chem 251: 6300-6303; Meth Enzymol (1985) volumes 114 & 115, eds Wyckoff H W et al., U.S. Pub. No. 2004/0014194), Bricogne G (1993) Acta Crystallogr D Biol Crystallogr 49(Pt 1): 37-60, Bricogne G (1997) Meth Enzymol 276A: 361-423, ed Carter C W, and Roversi et al., (2000) Acta Crystallogr D Biol Crystallogr 56(Pt 10): 1316-1323 (X-ray diffraction crystallography studies); and Champe et al., (1995) J Biol Chem 270: 1388-1394 and Cunningham B C & Wells J A (1989) Science 244: 1081-1085 (mutagenesis mapping).

[0314] Specific binding can be represented by a “binding affinity.” Binding affinity refers to an intrinsic binding affinity which reflects a 1:1 interaction between members of a binding pair (e.g., an antigen binding polypeptide or antigen binding polypeptide complex and an antigen). Binding affinity can be measured and/or expressed in several ways known in the art, including, but not limited to, equilibrium dissociation constant (K_{D}). K_{D} is calculated from the quotient of k_{off}/kₒₙ, where kₒₙ refers to the association rate constant of, e.g., an antigen binding polypeptide or antigen binding polypeptide complex to an antigen, and k_{off} refers to the dissociation of, e.g., an antigen binding polypeptide or antigen binding polypeptide complex from an antigen. The kₒₙ and k_{off} can be determined by techniques known to one of ordinary skill in the art, such as Octet BLI, BIAcore® or KinExA.

[0315] Accordingly, in some aspects, an antigen binding polypeptide complex of the invention is an antibody or antigen binding fragment thereof. In some aspects, the antibody or antigen binding fragment thereof comprises one, two, three or four antigen binding polypeptides described herein.

[0316] In some aspects, the antibody or antigen binding fragment thereof specifically binds to an antigen with an equilibrium dissociation constant (K_{D}) of from about 10 μM to about 1 pM. In another aspect, the antibody is IgG, IgM, IgE, IgA or IgD. For example, the antibody may be IgG. For example, the antibody may be IgM. For example, the antibody may be IgE. For example, the antibody may be IgA. For example, the antibody may be IgD. In some aspects, the IgG is IgG1, IgG2, IgG3 or IgG4. For example, the antibody may be IgG1. For example, the antibody may be IgG2. For example, the antibody may be IgG3. For example, the antibody may be IgG4. In some aspects, the antigen binding fragment is a Fab, scFab, Fab′, F(ab′)₂, Fv or scFv. For example, the antigen binding fragment may be a Fab. For example, the antigen binding fragment may be a scFab. For example, the antigen binding fragment may be a Fab′. For example, the antigen binding fragment may be a F(ab′)₂. For example, the antigen binding fragment may be a Fv. For example, the antigen binding fragment may be a scFv. In some aspects, the antibody is human or humanized. For example, the antibody may be human. For the example, the antibody may be humanized

### Amino Acid Linkers

[0317] In some aspects, an antigen binding polypeptide or antigen binding polypeptide complex (e.g., an antibody or antigen binding fragment thereof) of the invention comprises one or more amino acid linkers between one or more regions of the antigen binding polypeptide or antigen binding polypeptide complex.

[0318] As used herein, an “amino acid linker” refers to a single amino acid or short amino acid sequence that is capable of joining two polypeptide regions of the invention described herein in a stable manner that maintains or promotes a function associated with the polypeptide regions. In some aspects, an amino acid linker is represented herein in a structure of an antigen binding polypeptide or antigen binding polypeptide complex by the abbreviation “1” or “L” and a number (e.g., L1 to denote a first linker, L2 to denote a second linker, L3 to denote a third linker, L4 to denote a fourth linker, L5 to denote a fifth linker, L6 to denote a sixth linker, L7 to denote a seventh linker, L8 to denote an eighth linker, L9 to denote a ninth linker, L10 to denote a tenth linker, L11 to denote an eleventh linker, L12 to denote a twelfth linker). In some aspects, such enumerated amino acid linkers (e.g., L1) can have the same or different sequence as any other enumerated amino acid linker (e.g., L2, etc.). Furthermore, in other aspects, an enumerated amino acid linker present in one polypeptide (e.g., L1 on a first polypeptide of an antigen binding polypeptide and/or antigen binding polypeptide complex structure described herein) can have the same or different sequence as the same enumerated amino acid linker present in another polypeptide (e.g., L1 on a second polypeptide, third polypeptide, etc. of an antigen binding polypeptide and/or antigen binding polypeptide complex structure described herein).

[0319] In some aspects, an amino acid linker has a length of from about 1 amino acid to about 50 amino acids (e.g., one or more of L1, L2, L3, L4, L5, L6, L7, L8, L9, L10, L11, L12 etc. of an antigen binding polypeptide or a first, second, third, etc. polypeptide of an antigen binding polypeptide complex structure described herein). In some aspects, the amino acid linker has a length of from about 1 amino acid to about 45 amino acids, about 1 amino acid to about 40 amino acids, about 1 amino acid to about 35 amino acids, about 1 amino acid to about 30 amino acids, about 1 amino acid to about 25 amino acids, about 1 amino acid to about 20 amino acids, 1 amino acid to about 15 amino acids, about 1 amino acid to about 10 amino acids, about 1 amino acid to about 5 amino acids, about 5 amino acids to about 50 amino acids, about 5 amino acids to about 45 amino acids, about 5 amino acids to about 40 amino acids, about 5 amino acids to about 35 amino acids, about 5 amino acids to about 30 amino acids, about 5 amino acids to about 25 amino acids, about 5 amino acids to about 20 amino acids, about 5 amino acids to about 15 amino acids, about 5 amino acids to about 10 amino acids, about 10 amino acids to about 50 amino acids, about 10 amino acids to about 45 amino acids, about 10 amino acids to about 40 amino acids, about 10 amino acids to about 35 amino acids, about 10 amino acids to about 30 amino acids, about 10 amino acids to about 25 amino acids, about 10 amino acids to about 20 amino acids, about 10 amino acids to about 15 amino acids, about 15 amino acids to about 50 amino acids, about 15 amino acids to about 45 amino acids, about 15 amino acids to about 40 amino acids, about 15 amino acids to about 35 amino acids, about 15 amino acids to about 30 amino acids, about 15 amino acids to about 25 amino acids, about 15 amino acids to about 20 amino acids, about 20 amino acids to about 50 amino acids, about 20 amino acids to about 45 amino acids, about 20 amino acids to about 40 amino acids, about 20 amino acids to about 35 amino acids, about 20 amino acids to about 30 amino acids, about 20 amino acids to about 25 amino acids, about 25 amino acids to about 50 amino acids, about 25 amino acids to about 45 amino acids, about 25 amino acids to about 40 amino acids, about 25 amino acids to about 35 amino acids, about 25 amino acids to about 30 amino acids, about 30 amino acids to about 50 amino acids, about 30 amino acids to about 45 amino acids, about 30 amino acids to about 40 amino acids, about 30 amino acids to about 35 amino acids, about 40 amino acids to about 50 amino acids, about 40 amino acids to about 45 amino acids, or about 45 amino acids to about 50 amino acids.

[0320] In some aspects, the amino acid linker has about 1, about 2, about 3, about 4, about 5, about 6, about 7, about 8, about 9, about 10, about 11, about 12, about 13, about 14, about 15, about 16, about 17, about 18, about 19, about 20, about 25, about 30, about 35, about 40, about 45, or about 50 amino acids (e.g., one or more of L1, L2, L3, L4, L5, L6, L7, L8, L9, L10, L11 L12 etc. of an antigen binding polypeptide structure described herein or a first, second, third, etc. polypeptide of an antigen binding polypeptide complex structure described herein).

[0321] In some aspects, the amino acid linker consists of one or more amino acid residues (e.g., one or more of L1, L2, L3, L4, L5, L6, L7, L8, L9, L10, L11, L12 etc. of an antigen binding polypeptide structure described herein or a first, second, third, etc. polypeptide of an antigen binding polypeptide complex structure described herein). In some aspects, the amino acid residues are selected from the group consisting of glycine, alanine, serine, threonine, cysteine, asparagine, glutamine, leucine, isoleucine, valine, proline, histidine, aspartic acid, glutamic acid, lysine, arginine, methionine, phenylalanine, tryptophan, and tyrosine.

[0322] In some aspects, an amino acid linker of the invention is non-immunogenic. In some aspects, the non-immunogenic linker consists of serine, glycine and/or alanine residues, or consists of serine and/or glycine residues. In some aspects, an amino acid linker of the invention does not contain a T cell epitope or consensus T cell epitope.

[0323] In some aspects, the amino acid linker consists of one or more residues of alanine, cysteine, glycine, isoleucine, leucine, methionine, phenylalanine, proline, tryptophan, tyrosine, valine (e.g., one or more of L1, L2, L3, L4, L5, L6, L7, L8, L9, L10, L11, L12 etc. of an antigen binding polypeptide structure described herein or a first, second, third, etc. polypeptide of an antigen binding polypeptide complex structure described herein).

[0324] Amino acid linker sequences that can be used with the antigen binding polypeptides and antigen binding polypeptide complexes (e.g., an antibody or antigen binding fragment thereof) of the invention are well known and can be incorporated into antigen binding polypeptides and antigen binding polypeptide complexes of the invention using routine molecular biology and recombinant DNA techniques. See, e.g., Chen et al., Adv Drug Deliv Rev., 65(10):1357-1369, 2013; and Chichili et al., Protein Sci., 22(2):153-167, 2013.

[0325] In some aspects, the amino acid linker (e.g., one or more of L1, L2, L3, L4, L5, L6, L7, L8, L9, L10, L11, L12 etc. of a first, second, third, etc. polypeptide of an antigen binding polypeptide or antigen binding polypeptide complex structure described herein) has the sequence of g, a, gss, asg, ggssg, gssgs, gtvaa, asggs, astgg, asggsg, ggsggssgss, sggsgssggs, ggsggsgsgggsasgsg, ggsggsgsggggsasgsg, gggssggggsggsgsggsgs, ggggsggsgsggggsasgsg, gggssggsgsggsgsggsgs, sggssggsgsggsgsggsgssg, gsgssggggsggsgsggsgssg, ggggsgsggsgggssggggsggggsggggsggggsggggs, ggggsggggsggggsggggsggggsggggsggggsggggs, ggggsgsggsgggssggggsggggsggggsggggsggggssss, ggggsgsggsgggssggggsggggsggggsggggsggggssssgs, ggsgg, gsggsagsgsggggsasgsg, ggggs, or gsggsggsgsggggsasgsg (SEQ ID NOs:1-19 and 681-688), or a sequence having at least 50%, at least 60%, at least 70%, at least 80%, at least 90%, at least 91%, at least 93%, at least 93%, at least 94%, at least 95%, at least 96%, at least 97%, at least 98%, at least 99% or 100% identity to any one of SEQ ID NOs:1-19 and 681-688. For example, the amino acid linker (e.g., one or more of L1, L2, L3, L4, L5, L6, L7, L8, L9, L10, L11, L12 etc. of a first, second, third, etc. polypeptide of an antigen binding polypeptide or antigen binding polypeptide complex structure described herein) may comprise the amino acid sequence of any one of SEQ ID NOs: 1-19 and 681-688.

[0326] In some aspects, the antigen binding polypeptide or antigen binding polypeptide complex comprises a polypeptide having a structure represented by VL1-L1-VL2-L2-VH2-L3-VH1 or VH1-L1-VH2-L2-VL2-L3-VL1, wherein L1 comprises the amino acid sequence of ggssg (SEQ ID NO:1) or a sequence having at least 50%, at least 60%, at least 70%, at least 80%, at least 90% or at least 95% identity to SEQ ID NO:1; L2 comprises the amino acid sequence of ggggsggsgsggggsasgsg (SEQ ID NO:12) or a sequence having at least 50%, at least 60%, at least 70%, at least 80%, at least 90% or at least 95% identity to SEQ ID NO:12, and L3 comprises the amino acid sequence of ggssg (SEQ ID NO:1) or a sequence having at least 50%, at least 60%, at least 70%, at least 80%, at least 90% or at least 95% identity to SEQ ID NO:1. For example, the antigen binding polypeptide or antigen binding polypeptide complex comprising a polypeptide having a structure represented by VL1-L1-VL2-L2-VH2-L3-VH1 or VH1-L1-VH2-L2-VL2-L3-VL1 may comprise an L1 linker with the amino acid sequence of ggssg (SEQ ID NO:1), a L2 linker with the amino acid sequence of ggggsggsgsggggsasgsg (SEQ ID NO:12), and a L3 linker with the amino acid sequence of ggssg (SEQ ID NO:1).

[0327] In some aspects, the antigen binding polypeptide or antigen binding polypeptide complex comprises a polypeptide having a structure represented by VL1-L1-VL2-L2-VH2-L3-VH1-L4 or VH1-L1-VH2-L2-VL2-L3-VL1-L4, wherein L1 comprises the amino acid sequence of ggssg (SEQ ID NO:1) or a sequence having at least 50%, at least 60%, at least 70%, at least 80%, at least 90%, or at least 95% identity to SEQ ID NO:1, L2 comprises the amino acid sequence of ggggsggsgsggggsasgsg (SEQ ID NO:12) or a sequence having at least 50%, at least 60%, at least 70%, at least 80%, at least 90%, or at least 95% identity to SEQ ID NO:12, L3 comprises the amino acid sequence of ggssg (SEQ ID NO:1) or a sequence having at least 50%, at least 60%, at least 70%, at least 80%, at least 90%, or at least 95% identity to SEQ ID NO:1, and L4 comprises the amino acid sequence of asggsg (SEQ ID NO:6) or a sequence having at least 50%, at least 60%, at least 70%, at least 80%, at least 90%, or at least 95% identity to SEQ ID NO:6. For example, the antigen binding polypeptide or antigen binding polypeptide complex comprising a polypeptide having a structure represented by VL1-L1-VL2-L2-VH2-L3-VH1-L4 or VH1-L1-VH2-L2-VL2-L3-VL1-L4 may comprise a L1 linker with the amino acid sequence of ggssg (SEQ ID NO:1), a L2 linker with the amino acid sequence of ggggsggsgsggggsasgsg (SEQ ID NO:12), a L3 linker with the amino acid sequence of ggssg (SEQ ID NO:1) and a L4 linker with the amino acid sequence of asggsg (SEQ ID NO:6).

[0328] In some aspects, the antigen binding polypeptide or antigen binding polypeptide complex comprises a polypeptide having a structure represented by VL1-L1-VL2-L2-VH2-L3-VH1-L4 or VH1-L1-VH2-L2-VL2-L3-VL1-L4, wherein L1 comprises the amino acid sequence of gtvaa (SEQ ID NO:3) or a sequence having at least 50%, at least 60%, at least 70%, at least 80%, at least 90%, or at least 95% identity to SEQ ID NO:3, L2 comprises the amino acid sequence of ggggsggsgsggggsasgsg (SEQ ID NO:12) or a sequence having at least 50%, at least 60%, at least 70%, at least 80%, at least 90%, or at least 95% identity to SEQ ID NO:12, L3 comprises the amino acid sequence of astgg (SEQ ID NO:5) or a sequence having at least 50%, at least 60%, at least 70%, at least 80%, at least 90%, or at least 95% identity to SEQ ID NO:5, and L4 comprises the amino acid sequence of asggsg (SEQ ID NO:6) or a sequence having at least 50%, at least 60%, at least 70%, at least 80%, at least 90%, or at least 95% identity to SEQ ID NO:6. For example, the antigen binding polypeptide or antigen binding polypeptide complex comprising a polypeptide having a structure represented by VL1-L1-VL2-L2-VH2-L3-VH1-L4 or VH1-L1-VH2-L2-VL2-L3-VL1-L4 may comprise a L1 linker with the amino acid sequence of gtvaa (SEQ ID NO:3), a L2 linker with the amino acid sequence of ggggsggsgsggggsasgsg (SEQ ID NO:12), a L3 linker with the amino acid sequence of astgg (SEQ ID NO:5) and a L4 linker with the amino acid sequence of asggsg (SEQ ID NO:6).

[0329] In some aspects, the antigen binding polypeptide or antigen binding polypeptide complex comprising a polypeptide having a structure represented by VL1-L1-VL2-L2-VH2-L3-VH1-CL-L4-CH1 or VH1-L1-VH2-L2-VL2-L3-VL1-CL-L4-CH1, wherein L1 comprises the amino acid sequence of ggssg (SEQ ID NO:1) or a sequence having at least 50%, at least 60%, at least 70%, at least 80%, at least 90%, or at least 95% identity to SEQ ID NO:1, L2 comprises the amino acid sequence of ggggsggsgsggggsasgsg (SEQ ID NO:12) or a sequence having at least 50%, at least 60%, at least 70%, at least 80%, at least 90%, or at least 95% identity to SEQ ID NO:12, L3 comprises the amino acid sequence of ggssg (SEQ ID NO:1) or a sequence having at least 50%, at least 60%, at least 70%, at least 80%, at least 90%, or at least 95% identity to SEQ ID NO:1, and L4 comprises the amino acid sequence of ggggsggsgsggggsasgsg (SEQ ID NO:12) or a sequence having at least 50%, at least 60%, at least 70%, at least 80%, at least 90%, or at least 95% identity to SEQ ID NO:12. For example, the antigen binding polypeptide or antigen binding polypeptide complex comprising a polypeptide having a structure represented by VL1-L1-VL2-L2-VH2-L3-VH1-CL-L4-CH1 or VH1-L1-VH2-L2-VL2-L3-VL1-CL-L4-CH1 may comprise a L1 linker with the amino acid sequence of ggssg (SEQ ID NO:1), a L2 linker with the amino acid sequence of ggggsggsgsggggsasgsg (SEQ ID NO:12), a L3 linker with the amino acid sequence of ggssg (SEQ ID NO:1) and a L4 linker with the amino acid sequence of ggggsggsgsggggsasgsg (SEQ ID NO:12).

[0330] In some aspects, the antigen binding polypeptide complex comprises a second polypeptide having a structure represented by VL3-L4-VH3 or VH3-L4-VL3, wherein L4 comprises the amino acid sequence of ggggsggsgsggggsasgsg (SEQ ID NO:12) or a sequence having at least 50%, at least 60%, at least 70%, at least 80%, at least 90%, or at least 95% identity to SEQ ID NO:12. For example, the antigen binding polypeptide complex comprising a second polypeptide having a structure represented by VL3-L4-VH3 or VH3-L4-VL3 may comprise a L4 linker with the amino acid sequence of ggggsggsgsggggsasgsg (SEQ ID NO:12). In some aspects, the antigen binding polypeptide complex comprises a second polypeptide having a structure represented by VL3-L4-VH3-L5 or VH3-L4-L5, wherein L4 comprises the amino acid sequence of ggggsggsgsggggsasgsg (SEQ ID NO:12) or a sequence having at least 50%, at least 60%, at least 70%, at least 80%, at least 90%, or at least 95% identity to SEQ ID NO:12, and L5 comprises the amino acid sequence of asggsg (SEQ ID NO:6) or a sequence having at least 50%, at least 60%, at least 70%, at least 80%, at least 90%, or at least 95% identity to SEQ ID NO:6. For example, the antigen binding polypeptide complex comprising a second polypeptide having a structure represented by VL3-L4-VH3-L5 or VH3-L4-L5 may comprise a L4 linker with the amino acid sequence of ggggsggsgsggggsasgsg (SEQ ID NO:12) and a L5 linker with the amino acid sequence of asggsg (SEQ ID NO:6).

[0331] In some aspects, the antigen binding polypeptide or antigen binding polypeptide complex comprises a polypeptide having a structure represented by VL1-L1-VL2-L2-VH2-L3-VH1-L4-Fc-Fc or VH1-L1-VH2-L2-VL2-L3-VII-L4-Fc-Fc, wherein L1 comprises the amino acid sequence of ggssg (SEQ ID NO:1) or a sequence having at least 50%, at least 60%, at least 70%, at least 80%, at least 90%, or at least 95% identity to SEQ ID NO:1, L2 comprises the amino acid sequence of ggggsggsgsggggsasgsg (SEQ ID NO:12) or a sequence having at least 50%, at least 60%, at least 70%, at least 80%, at least 90%, or at least 95% identity to SEQ ID NO:12, L3 comprises the amino acid sequence of ggssg (SEQ ID NO:1) or a sequence having at least 50%, at least 60%, at least 70%, at least 80%, at least 90%, or at least 95% identity to SEQ ID NO:1, and L4 comprises the amino acid sequence of asggsg (SEQ ID NO:6) or a sequence having at least 50%, at least 60%, at least 70%, at least 80%, at least 90%, or at least 95% identity to SEQ ID NO:6. For example, the antigen binding polypeptide or antigen binding polypeptide complex comprising a polypeptide having a structure represented by VL1-L1-VL2-L2-VH2-L3-VH1-L4-Fc-Fc or VH1-L1-VH2-L2-VL2-L3-VL1-L4-Fc-Fc may comprise a L1 linker with the amino acid sequence of ggssg (SEQ ID NO:1), a L2 linker with the amino acid sequence of ggggsggsgsggggsasgsg (SEQ ID NO:12), a L3 linker with the amino acid sequence of ggssg (SEQ ID NO:1) and a L4 linker with the amino acid sequence of asggsg (SEQ ID NO:6).

[0332] In some aspects, the antigen binding polypeptide or antigen binding polypeptide complex comprises a polypeptide having a structure represented by VL1-L1-VL2-L2-VH2-L3-VH1-L4-Fc-L5-Fc or VH1-L1-VH2-L2-VL2-L3-VL1-L4-Fc-L5-Fc, wherein L1 comprises the amino acid sequence of ggssg (SEQ ID NO:1) or a sequence having at least 50%, at least 60%, at least 70%, at least 80%, at least 90%, or at least 95% identity to SEQ ID NO:1, L2 comprises the amino acid sequence of ggggsggsgsggggsasgsg (SEQ ID NO:12) or a sequence having at least 50%, at least 60%, at least 70%, at least 80%, at least 90%, or at least 95% identity to SEQ ID NO:12, L3 comprises the amino acid sequence of ggssg (SEQ ID NO:1) or a sequence having at least 50%, at least 60%, at least 70%, at least 80%, at least 90%, or at least 95% identity to SEQ ID NO:1, L4 comprises the amino acid sequence of asggsg (SEQ ID NO:6) or a sequence having at least 50%, at least 60%, at least 70%, at least 80%, at least 90%, or at least 95% identity to SEQ ID NO:6, and L5 comprises the amino acid sequence of ggggsgsggsgggssggggsggggsggggsggggsggggssss (SEQ ID NO:18) or a sequence having at least 50%, at least 60%, at least 70%, at least 80%, at least 90%, or at least 95% identity to SEQ ID NO:18. For example, the antigen binding polypeptide or antigen binding polypeptide complex comprising a polypeptide having a structure represented by VL1-L1-VL2-L2-VH2-L3-VH1-L4-Fc-L5-Fc or VH1-L1-VH2-L2-VL2-L3-VL1-L4-Fc-L5-Fc may comprise a L1 linker with the amino acid sequence of ggssg (SEQ ID NO:1), a L2 linker with the amino acid sequence of ggggsggsgsggggsasgsg (SEQ ID NO:12), a L3 linker with the amino acid sequence of ggssg (SEQ ID NO:1), a L4 linker with the amino acid sequence of asggsg (SEQ ID NO:6), and a L5 linker with the amino acid sequence of ggggsgsggsgggssggggsggggsggggsggggsggggssss (SEQ ID NO:18).

[0333] In some aspects, the antigen binding polypeptide or antigen binding polypeptide complex comprises a polypeptide having a structure represented by VL1-L1-VL2-L2-VH2-L3-VH1-L4-Fc-L5-Fc or VH1-L1-VH2-L2-VL2-L3-VL1-L4-Fc-L5-Fc, wherein L1 comprises the amino acid sequence of ggssg (SEQ ID NO:1) or a sequence having at least 50%, at least 60%, at least 70%, at least 80%, at least 90%, or at least 95% identity to SEQ ID NO:1, L2 comprises the amino acid sequence of ggggsggsgsggggsasgsg (SEQ ID NO:12) or a sequence having at least 50%, at least 60%, at least 70%, at least 80%, at least 90%, or at least 95% identity to SEQ ID NO:12, L3 comprises the amino acid sequence of ggssg (SEQ ID NO:1) or a sequence having at least 50%, at least 60%, at least 70%, at least 80%, at least 90%, or at least 95% identity to SEQ ID NO:1, L4 comprises the amino acid sequence of asggsg (SEQ ID NO:6) or a sequence having at least 50%, at least 60%, at least 70%, at least 80%, at least 90%, or at least 95% identity to SEQ ID NO:6, and L5 comprises the amino acid sequence of ggggsgsggsgggssggggsggggsggggsggggsggggssssgs (SEQ ID NO:19) or a sequence having at least 50%, at least 60%, at least 70%, at least 80%, at least 90%, or at least 95% identity to SEQ ID NO:19. For example, the antigen binding polypeptide or antigen binding polypeptide complex comprising a polypeptide having a structure represented by VL1-L1-VL2-L2-VH2-L3-VH1-L4-Fc-L5-Fc or VH1-L1-VH2-L2-VL2-L3-VL1-L4-Fc-L5-Fc may comprise a L1 linker with the amino acid sequence of ggssg (SEQ ID NO:1), a L2 linker with the amino acid sequence of ggggsggsgsggggsasgsg (SEQ ID NO:12), a L3 linker with the amino acid sequence of ggssg (SEQ ID NO:1), a L4 linker with the amino acid sequence of asggsg (SEQ ID NO:6), and a L5 linker with the amino acid sequence of ggggsgsggsgggssggggsggggsggggsggggsggggssssgs (SEQ ID NO:19).

[0334] In some aspects, the antigen binding polypeptide or antigen binding polypeptide complex comprises a polypeptide having a structure represented by VL1-L1-VL2-L2-VH2-L3-VH1-L4-CH3-L5-CH3 or VH1-L1-VH2-L2-VL2-L3-VL1-L4-CH3-L5-CH3, wherein L1 comprises the amino acid sequence of ggssg (SEQ ID NO:1) or a sequence having at least 50%, at least 60%, at least 70%, at least 80%, at least 90%, or at least 95% identity to SEQ ID NO:1, L2 comprises the amino acid sequence of ggggsggsgsggggsasgsg (SEQ ID NO:12) or a sequence having at least 50%, at least 60%, at least 70%, at least 80%, at least 90%, or at least 95% identity to SEQ ID NO:12, L3 comprises the amino acid sequence of ggssg (SEQ ID NO:1) or a sequence having at least 50%, at least 60%, at least 70%, at least 80%, at least 90%, or at least 95% identity to SEQ ID NO:1, L4 comprises the amino acid sequence of asggsg (SEQ ID NO:6) or a sequence having at least 50%, at least 60%, at least 70%, at least 80%, at least 90%, or at least 95% identity to SEQ ID NO:6, and L5 comprises the amino acid sequence of gggssggggsggsgsggsgs (SEQ ID NO:11) or a sequence having at least 50%, at least 60%, at least 70%, at least 80%, at least 90%, or at least 95% identity to SEQ ID NO:11. For example, the antigen binding polypeptide or antigen binding polypeptide complex comprising a polypeptide having a structure represented by VL1-L1-VL2-L2-VH2-L3-VH1-L4-CH3-L5-CH3 or VH1-L1-VH2-L2-VL2-L3-VL1-L4-CH3-L5-CH3 may comprise a L1 linker with the amino acid sequence of ggssg (SEQ ID NO:1), a L2 linker with the amino acid sequence of ggggsggsgsggggsasgsg (SEQ ID NO:12), a L3 linker with the amino acid sequence of ggssg (SEQ ID NO:1), a L4 linker with the amino acid sequence of asggsg (SEQ ID NO:6), and a L5 linker with the amino acid sequence of gggssggggsggsgsggsgs (SEQ ID NO:11).

[0335] In some aspects, the antigen binding polypeptide or antigen binding polypeptide complex comprises a polypeptide having a structure represented by VL1-L1-VL2-L2-VH2-L3-VH1-L4-CH3-L5-CH3 or VH1-L1-VH2-L2-VL2-L3-VL1-L4-CH3-L5-CH3, wherein L1 comprises the amino acid sequence of ggssg (SEQ ID NO:1) or a sequence having at least 50%, at least 60%, at least 70%, at least 80%, at least 90%, or at least 95% identity to SEQ ID NO:1, L2 comprises the amino acid sequence of ggggsggsgsggggsasgsg (SEQ ID NO:12) or a sequence having at least 50%, at least 60%, at least 70%, at least 80%, at least 90%, or at least 95% identity to SEQ ID NO:12, L3 comprises the amino acid sequence of ggssg (SEQ ID NO:1) or a sequence having at least 50%, at least 60%, at least 70%, at least 80%, at least 90%, or at least 95% identity to SEQ ID NO:1, L4 comprises the amino acid sequence of asggsg (SEQ ID NO:6) or a sequence having at least 50%, at least 60%, at least 70%, at least 80%, at least 90%, or at least 95% identity to SEQ ID NO:6, and L5 comprises the amino acid sequence of gggssggggsggsgsggsgs (SEQ ID NO:11) or a sequence having at least 50%, at least 60%, at least 70%, at least 80%, at least 90%, or at least 95% identity to SEQ ID NO:11. For example, the antigen binding polypeptide or antigen binding polypeptide complex comprising a polypeptide having a structure represented by VL1-L1-VL2-L2-VH2-L3-VH1-L4-CH3-L5-CH3 or VH1-L1-VH2-L2-VL2-L3-VL1-L4-CH3-L5-CH3 may comprise a L1 linker with the amino acid sequence of ggssg (SEQ ID NO:1), a L2 linker with the amino acid sequence of ggggsggsgsggggsasgsg (SEQ ID NO:12), a L3 linker with the amino acid sequence of ggssg (SEQ ID NO:1), a L4 linker with the amino acid sequence of asggsg (SEQ ID NO:6), and a L5 linker with the amino acid sequence of gggssggggsggsgsggsgs (SEQ ID NO:11).

[0336] In some aspects, the antigen binding polypeptide or antigen binding polypeptide complex comprises a polypeptide having a structure represented by VL1-L1-VL2-L2-VH2-L3-VH1-L4-CH3-L5-CH3 or VH1-L1-VH2-L2-VL2-L3-VL1-L4-CH3-L5-CH3, wherein L1 comprises the amino acid sequence of ggssg (SEQ ID NO:1) or a sequence having at least 50%, at least 60%, at least 70%, at least 80%, at least 90%, or at least 95% identity to SEQ ID NO:1, L2 comprises the amino acid sequence of ggggsggsgsggggsasgsg (SEQ ID NO:12) or a sequence having at least 50%, at least 60%, at least 70%, at least 80%, at least 90%, or at least 95% identity to SEQ ID NO:12, L3 comprises the amino acid sequence of ggssg (SEQ ID NO:1) or a sequence having at least 50%, at least 60%, at least 70%, at least 80%, at least 90%, or at least 95% identity to SEQ ID NO:1, L4 comprises the amino acid sequence of asggsg (SEQ ID NO:6) or a sequence having at least 50%, at least 60%, at least 70%, at least 80%, at least 90%, or at least 95% identity to SEQ ID NO:6, and L5 comprises the amino acid sequence of gsgssggggsggsgsggsgssg (SEQ ID NO:15) or a sequence having at least 50%, at least 60%, at least 70%, at least 80%, at least 90%, or at least 95% identity to SEQ ID NO:15. For example, the antigen binding polypeptide or antigen binding polypeptide complex comprising a polypeptide having a structure represented by VL1-L1-VL2-L2-VH2-L3-VH1-L4-CH3-L5-CH3 or VH1-L1-VH2-L2-VL2-L3-VL1-L4-CH3-L5-CH3 may comprise a L1 linker with the amino acid sequence of ggssg (SEQ ID NO:1), a L2 linker with the amino acid sequence of ggggsggsgsggggsasgsg (SEQ ID NO:12), a L3 linker with the amino acid sequence of ggssg (SEQ ID NO:1), a L4 linker with the amino acid sequence of asggsg (SEQ ID NO:6), and a L5 linker with the amino acid sequence of gsgssggggsggsgsggsgssg (SEQ ID NO:15).

[0337] In some aspects, the antigen binding polypeptide or antigen binding polypeptide complex comprises a polypeptide having a structure represented by VL1-L1-VL2-L2-VH2-L3-VH1-CL-L4-CH1-Fc-L5-Fc or VH1-L1-VH2-L2-VL2-L3-VL1-CL-L4-CH1-Fc-L5-Fc, wherein L1 comprises the amino acid sequence of ggssg (SEQ ID NO:1) or a sequence having at least 50%, at least 60%, at least 70%, at least 80%, at least 90%, or at least 95% identity to SEQ ID NO:1, L2 comprises the amino acid sequence of ggggsggsgsggggsasgsg (SEQ ID NO:12) or a sequence having at least 50%, at least 60%, at least 70%, at least 80%, at least 90%, or at least 95% identity to SEQ ID NO:12, L3 comprises the amino acid sequence of ggssg (SEQ ID NO:1) or a sequence having at least 50%, at least 60%, at least 70%, at least 80%, at least 90%, or at least 95% identity to SEQ ID NO:1, L4 comprises the amino acid sequence of ggggsggsgsggggsasgsg (SEQ ID NO:12) or a sequence having at least 50%, at least 60%, at least 70%, at least 80%, at least 90%, or at least 95% identity to SEQ ID NO:12, and L5 comprises the amino acid sequence of ggggsgsggsgggssggggsggggsggggsggggsggggs (SEQ ID NO:16) or a sequence having at least 50%, at least 60%, at least 70%, at least 80%, at least 90%, or at least 95% identity to SEQ ID NO:16. For example, the antigen binding polypeptide or antigen binding polypeptide complex comprising a polypeptide having a structure represented by VIA-L1-VL2-L2-VH2-L3-VH1-CL-L4-CH1-Fc-L5-Fc or VH1-L1-VH2-L2-VL2-L3-VL1-CL-L4-CH1-Fc-L5-Fc may comprise a L1 linker with the amino acid sequence of ggssg (SEQ ID NO:1), a L2 linker with the amino acid sequence of ggggsggsgsggggsasgsg (SEQ ID NO:12), a L3 linker with the amino acid sequence of ggssg (SEQ ID NO:1), a L4 linker with the amino acid sequence of ggggsggsgsggggsasgsg (SEQ ID NO:12), and a L5 linker with the amino acid sequence of ggggsgsggsgggssggggsggggsggggsggggsggggs (SEQ ID NO:16).

[0338] In some aspects of an antigen binding polypeptide or antigen binding polypeptide complex of the invention, L1 comprises the amino acid sequence of ggssg (SEQ ID NO:1) or an amino acid sequence having at least 90% identity or at least 95% identity to SEQ ID NO:1; L2 comprises the amino acid sequence of ggggsggsgsggggsasgsg (SEQ ID NO:12) or an amino acid sequence having at least 90% identity or at least 95% identity to SEQ ID NO:12; L3 comprises the amino acid sequence of SEQ ID NO:1 or an amino acid sequence having at least 90% identity or at least 95% identity to SEQ ID NO:1; and L4 comprises the amino acid sequence of asggsg (SEQ ID NO:6) or an amino acid sequence having at least 90% identity or at least 95% identity to SEQ ID NO:6. For example, the antigen binding polypeptide or antigen binding polypeptide complex may comprise a L1 linker with the amino acid sequence of ggssg (SEQ ID NO:1), a L2 linker with the amino acid sequence of ggggsggsgsggggsasgsg (SEQ ID NO:12), a L3 linker with the amino acid sequence of ggssg (SEQ ID NO:1), and a L4 linker with the amino acid sequence of asggsg (SEQ ID NO:6).

[0339] In another aspect, the invention is directed to an antigen binding polypeptide complex comprising a first polypeptide and a second polypeptide; wherein the first polypeptide has a structure represented by VL1-VL2-VH2-VH1; VH1-VH2-VL2-VL1; VL1-L1-VL2-L2-VH2-L3-VH1; or VH1-L1-VH2-L2-VL2-L3-VL1; wherein the second polypeptide has a structure represented by VL3-VL4-VH4-VH3; VH3-VH4-VL4-VL3; VL3-L4-VL4-L5-VH4-L6-VH3; or VH3-L4-VH4-L5-VL4-L6-VL3; wherein VL1 is a first immunoglobulin light chain variable region that specifically binds to an HIV protein; VL2 is a second immunoglobulin light chain variable region that specifically binds to an HIV protein; VL3 is a third immunoglobulin light chain variable region that specifically binds to an HIV protein; VL4 is a fourth immunoglobulin light chain variable region that specifically binds to an HIV protein; VH1 is a first immunoglobulin heavy chain variable region that specifically binds to an HIV protein; VH2 is a second immunoglobulin heavy chain variable region that specifically binds to an HIV protein; VH3 is a third immunoglobulin heavy chain variable region that specifically binds to an HIV protein; VH4 is a fourth immunoglobulin heavy chain variable region that specifically binds to an HIV protein; L1, L2, L3, L4, L5 and L6 are amino acid linkers; L1 comprises the amino acid sequence of ggssg (SEQ ID NO:1) or an amino acid sequence having at least 90% identity or at least 95% identity to SEQ ID NO:1; L2 comprises the amino acid sequence of ggggsggsgsggggsasgsg (SEQ ID NO:12) or an amino acid sequence having at least 90% identity or at least 95% identity to SEQ ID NO:12; L3 comprises the amino acid sequence of SEQ ID NO:1 or an amino acid sequence having at least 90% identity or at least 95% identity to SEQ ID NO:1; and L4 comprises the amino acid sequence of asggsg (SEQ ID NO:6) or an amino acid sequence having at least 90% identity or at least 95% identity to SEQ ID NO:6. For example, the antigen binding polypeptide complex comprising a first polypeptide having a structure represented by VL1-VL2-VH2-VH1; VH1-VH2-VL2-VL1; VL1-L1-VL2-L2-VH2-L3-VH1; or VH1-L1-VH2-L2-VL2-L3-VL1; and a second polypeptide having a structure represented by VL3-VL4-VH4-VH3; VH3-VH4-VL4-VL3; VL3-L4-VL4-L5-VH4-L6-VH3; or VH3-L4-VH4-L5-VL4-L6-VL3 may comprise a L1 linker with the amino acid sequence of ggssg (SEQ ID NO:1), a L2 linker with the amino acid sequence of ggggsggsgsggggsasgsg (SEQ ID NO:12), a L3 linker with the amino acid sequence of ggssg (SEQ ID NO:1), and a L4 linker with the amino acid sequence of asggsg (SEQ ID NO:6).

[0340] Detectable Labels and Drug Conjugates

[0341] In some aspects, an antigen binding polypeptide or antigen binding polypeptide complex (e.g., an antibody or antigen binding fragment thereof) of the invention comprises one or more detectable labels. An antigen binding polypeptide or antigen binding polypeptide complex (e.g., an antibody or antigen binding fragment thereof) containing a detectable label is useful in therapeutic, diagnostic, imaging (e.g., radioimaging), or basic research applications.

[0342] In some aspects, the detectable label is a radioactive label. Examples of a radioactive label include, but are not limited to, the isotopes ³H, ¹⁴C, ³²P, ³⁵S, ³⁶Cl, ⁵⁷Cr, ⁵⁷Co, ⁵⁸Co, ⁵⁹Fe, ⁹⁰Y, ¹²¹I, ¹²⁴I, ¹²⁵I, ¹³¹I, ¹¹¹In, ¹¹⁷Lu, ²¹¹At, ¹⁹⁸Au, ⁶⁷Cu, ²²⁵AC, ²¹³Bi, ⁹⁹TC, ¹⁸⁶Re and ⁸⁹Zr.

[0343] In some aspects, the detectable label is a chemiluminescent label, fluorescent label, enzyme, biotin, or a combination thereof.

[0344] In some aspects, the detectable label is a peptide tag. In some aspects, the peptide tag is located at the N-terminus of the polypeptide or polypeptide complex. In some aspects, the peptide tag is located at the C-terminus of the polypeptide or polypeptide complex. In some aspects, the peptide tag is an affinity tag or fusion tag.

[0345] In some aspects, the detectable label is a polyhistidine tag, polyarginine tag, glutathione-S-transferase (GST), maltose binding protein (MBP), chitin binding protein (CBP), Strep-tag, thioredoxin (TRX), poly(NANP), FLAG tag, ALFA-tag, V5-tag, Myc-tag, hemagglutinin (HA) tag, Spot tag, T7 tag, NE tag, or green fluorescence protein (GFP), or a combination thereof. In some aspects, the polyhistidine tag consists of from about 4 to about 10 histidine residues. In some aspects, the polyhistidine tag consists of about 4, about 5, about 6, about 7, about 8, about 9, or about 10 histidine residues.

[0346] Additional examples of detectable labels and methods for introducing detectable labels into a polypeptide are known and include routine chemical, molecular biology and recombinant DNA techniques. See, e.g., Hnatowich et al., Science, 220(4597):613-615, 1983; Yao et al., Int. J. Mol. Sci., 17(2):194, 2016; Kimple et al., Curr. Protoc. Protein Sci., 73:Unit 9.9, 2013; Sambrook J, Fritsch E F. Molecular Cloning: A Laboratory Manual. Cold Spring Harbor Laboratory Press; Cold Spring Harbor, N.Y.: 1989; Molecular Cell Biology, 4^{th} edition, Section 3.5, Purifying, Detecting and Characterizing Proteins; and Mahmoodi et al., Cogent Biology, 5(1):DOI: 10/1080/23312025.2019.1665406.

[0347] In some aspects, an antigen binding polypeptide or antigen binding polypeptide complex (e.g., an antibody or antigen binding fragment thereof) of the invention is conjugated to an agent as an antibody-drug conjugate (ADC). An ADC of the invention is useful in therapeutic, diagnostic, imaging (e.g., radioimaging), or basic research applications.

[0348] In some aspects, an antigen binding polypeptide or antigen binding polypeptide complex (e.g., an antibody or antigen binding fragment thereof) of the invention is conjugated to a cytotoxic agent, immunomodulating agent, imaging agent, or therapeutic protein, typically via a linker. The linker can comprise a cleavable unit or can be non-cleavable. Cleavable units include, for example, disulfide containing linkers that are cleavable through disulfide exchange, acid-labile linkers that are cleavable at acidic pH, and linkers that are cleavable by hydrolases, esterases, peptidases, and glucuronidases (e.g., peptide linkers and glucuronide linkers). Non-cleavable linkers are believed to release drug via a proteolytic antibody degradation mechanism.

[0349] Methods for making an ADC are known and include, but are not limited to, conjugation via thiols, amides, aldehydes, or azides, as well as other routine chemical, molecular biology and recombinant DNA techniques. See, e.g., Yao et al., Int. J. Mol. Sci., 17(2):194, 2016; Sambrook J, Fritsch E F. Molecular Cloning: A Laboratory Manual. Cold Spring Harbor Laboratory Press; Cold Spring Harbor, N.Y.: 1989; Molecular Cell Biology, 4th edition, Section 3.5, Purifying, Detecting and Characterizing Proteins; and Mahmoodi et al., Cogent Biology, 5(1):DOI: 10/1080/23312025.2019.1665406.

### Modifications

[0350] In some aspects, the invention is directed to an antigen binding polypeptide or antigen binding polypeptide complex (e.g., an antibody or antigen binding fragment thereof) comprising an effector function mutation or half-life extension mutation.

[0351] Effector functions are an important part of the humoral immune response and form an link between innate and adaptive immunity. Most effector functions are induced via the Fc region of an antibody, which can interact with complement proteins and specialized Fc receptors. As used herein, an “effector function mutation,” refers to a change in the amino acid sequence, typically in the Fc region, which can increase or decrease effector function, for example, increase binding affinity of Fc for specific Fc receptors, or increase antibody-dependent cellular cytotoxicity (ADCC) activity.

[0352] “Half-life” of a pharmaceutically active substance is the time it takes for the amount of the substance, once administered to the body, to reduce by half. A “half-life extension mutation” of an antigen binding polypeptide or antigen binding polypeptide complex of the invention refers to a change in the amino acid sequence, typically in the Fc region, which increases the half-life of the antigen binding polypeptide or antigen binding polypeptide complex (e.g., by increasing Fc receptor binding affinity, slowing off-rate for Fc and Fc receptors, and/or increased sialylation).

[0353] Examples of effector function mutations that increase function include, but are not limited to, the following substitutions in the Fc region, based on the EU numbering scheme: S298A/E333A/K334A, S239D/I332E, S239D/A330L/I332E, and G236A/S239D/I332E. Examples of effector function mutations that decrease function include, but are not limited to, the following substitutions in the Fc region, based on the EU numbering scheme: N297A and L234A/L235A. Additional examples of effector function mutations, half-life extension mutations and methods for incorporating the same into an amino acid sequence are known and described, for example, in Saunders, “Conceptual Approaches to Modulating Antibody Effector Functions and Circulation Half-Life,” Front. Immunol. Jun. 7, 2019.

[0354] In some aspects, the invention is directed to an antigen binding polypeptide or antigen binding polypeptide complex (e.g., an antibody or antigen binding fragment thereof) comprising one or more knob-into-hole modifications.

[0355] The term “knob-into-hole modification” as used herein, refers to a genetic modification that directs the pairing of two polypeptides to promote heterodimerization. In some aspects, the modification introduces a protuberance (knob) into one polypeptide and a cavity (hole) into the other polypeptide at an interface in which the two polypeptides interact. In some aspects, a knob-into-hole modification can be created by introducing only a hole modification, for example, by replacing an amino acid residue with a smaller side chain than the original amino acid residue (e.g., a substitution of one or more serine, threonine, valine or alanine residues, or a combination thereof). In some aspects, a knob-into-hole modification can be created by introducing only a knob modification, for example, by replacing an amino acid residue with a larger side chain than the original amino acid residue (e.g., a substitution of one or more tryptophan or tyrosine residues, or a combination thereof).

[0356] In some aspects, the knob-into-hole modification is in the binding interface of two Fc regions, the binding interface of two CH2 regions, the binding interface of two CH3 regions, the binding interface of a CL region and a CH1 region, or the binding interface of a VH region and a VL region. See, e.g., U.S. Pub. No. 2007/0178552, Int'l Pub. No. WO 96/027011, Int'l Pub. No. WO 98/050431 and Zhu et al., Protein Science 6:781-788, 1987.

[0357] In some aspects, the antigen binding polypeptide or antigen binding polypeptide complex comprises one, two, three, four, five, six, seven, eight, nine, ten, or more knob-into-hole modifications.

[0358] Knob-into-hole modifications are well known and can be incorporated into the antigen binding polypeptides and antigen binding polypeptide complexes of the invention using routine molecular biology and recombinant DNA techniques. See, e.g., U.S. Pub. No. 2003/0078385; Int'l Pub. No. WO 96/027011; Ridgway et al., Protein Eng., 9:617-621, 1996; and Merchant et al., Nat. Biotechnol., 16:677-681, 1998.

[0359] In some aspects, the knob-into-hole modification is an amino acid substitution. As used herein, such a substitution is described based on the EU numbering scheme of Kabat, which corresponds to the numbering in the Protein Data Bank (PDB).

[0360] In some aspects, the knob-into-hole modification is a knob substitution of S354C and/or T366W, based on the EU numbering scheme.

[0361] In some aspects, the knob-into-hole modification is a hole substitution of Y349C, T366S, L368A, Y407V, L234A, L235A, P239A, M428L, N433S, M252Y, S254T, T256E, or any combination thereof, based on the EU numbering scheme.

[0362] In another aspect, the knob-into-hole modifications are hole substitutions of Y349C, T366S, L368A and Y407V, based on the EU numbering scheme. In some aspects, the knob-into-hole modifications are a hole substitutions of L234A, L235A and P239A, based on the EU numbering scheme. In some aspects, the knob-into-hole modifications are hole substitutions of L234A and L235A, based on the EU numbering scheme. In some aspects, the knob-into-hole modifications are hole substitutions of M428L and N433S, based on the EU numbering scheme. In some aspects, the knob-into-hole modifications are hole substitutions of M252Y, S254T and T256E, based on the EU numbering scheme.

[0363] In some aspects, an antigen binding polypeptide complex is an IgG1 or IgG4 antibody and the knob-into-hole modifications are knob substitutions of S354C and T366W and hole substitutions of Y349C, T366S, L368A and Y407V.

[0364] In some aspects, the antigen binding polypeptide complex is an IgG1 or IgG4 antibody and the knob-into-hole modifications are hole substitutions of L234A, L235A and P239A.

[0365] In some aspects, the antigen binding polypeptide complex is an IgG1 or IgG4 antibody and the knob-into-hole modifications are hole substitutions of L234A and L235A.

[0366] In some aspects, the antigen binding polypeptide complex is an IgG1 or IgG4 antibody and the knob-into-hole modifications are hole substitutions of M428L and N433 S.

[0367] In some aspects, the antigen binding polypeptide complex is an IgG1 or IgG4 antibody and the knob-into-hole modifications are hole substitutions of M252Y, S254T and T256E.

### Chimeric Antigen Receptors

[0368] In some aspects of the invention, the antigen binding polypeptides and antigen binding polypeptide complexes can be used in chimeric antigen receptor (CAR) therapy. In some aspects, the invention is directed to a CAR comprised of an antigen binding polypeptide or antigen binding polypeptide complex of the invention. In some aspects, a CAR of the invention comprises an antigen binding polypeptide or antigen binding polypeptide complex of the invention and a transmembrane region. In some aspects, a CAR of the invention comprises an antigen binding polypeptide or antigen binding polypeptide complex of the invention, a transmembrane region, and an intracellular region. In some aspects, the intracellular region is comprised of a costimulatory region and/or an intracellular signal transduction region. In another aspect, the intracellular region is a T cell activation domain. In some aspects, the antigen binding polypeptide or antigen binding polypeptide complex of the invention is joined to the transmembrane region by an immunoglobulin hinge.

### Polypeptides, Polynucleotides, Vectors, Cells, and Protein Production Methods

[0369] In some aspects, the invention is directed to a polypeptide encoding an antigen binding polypeptide or antigen binding polypeptide complex (e.g., an antibody or antigen binding fragment thereof) described herein.

[0370] In some aspects, the invention is directed to a polypeptide comprising an amino acid sequence of one or more of SEQ ID NOs:32-43, 62-79, 130-138, 633, 635, 637, 639, 641, 643, 645, 647, 649, 651, 653, 655, 657, 659, 661, 663, 665, 667, 669, 671, 673, 675, 677, and 679, or an amino acid sequence having at least 90% identity or at least 95% identity to one or more of SEQ ID NOs:32-43, 62-79, 130-138, 633, 635, 637, 639, 641, 643, 645, 647, 649, 651, 653, 655, 657, 659, 661, 663, 665, 667, 669, 671, 673, 675, 677, and 679. For example, the polypeptide may comprise an amino acid sequence having at least 90% (such as at least 91%, 92%, 93%, 94%, 95%, 96%, 97%, 98%, or 99%) identity to one or more of SEQ ID NOs:32-43, 62-79, 130-138, 633, 635, 637, 639, 641, 643, 645, 647, 649, 651, 653, 655, 657, 659, 661, 663, 665, 667, 669, 671, 673, 675, 677, and 679. For example, the polypeptide may comprise the amino acid sequence of one or more of SEQ ID NOs:32-43, 62-79, 130-138, 633, 635, 637, 639, 641, 643, 645, 647, 649, 651, 653, 655, 657, 659, 661, 663, 665, 667, 669, 671, 673, 675, 677, and 679. In some aspects, the invention is directed to a polypeptide comprising an amino acid sequence having at least 90% identity, at least 95% identity, or 100% identity to the amino acid sequence of SEQ ID NOs:32 or 33 that does not contain the eight histidine residues at the C-terminus. For example, the polypeptide may comprise an amino acid sequence having at least 90% (such as at least 91%, 92%, 93%, 94%, 95%, 96%, 97%, 98%, or 99%) identity to the amino acid sequence of SEQ ID NOs:32 or 33 that does not contain the eight histidine residues at the C-terminus. For example, the polypeptide may comprise the amino acid sequence of SEQ ID NOs:32 or 33 that does not contain the eight histidine residues at the C-terminus.

[0371] In some aspects, the invention is directed to a polypeptide comprising an amino acid sequence encoded by one or more of SEQ ID NOs:44-55, 80-97, 139-147, 634, 636, 638, 640, 642, 644, 646, 648, 650, 652, 654, 656, 658, 660, 662, 664, 666, 668, 670, 672, 674, 676, 678, and 680, or encoded by a polynucleotide having at least 90% identity or at least 95% identity to one or more of SEQ ID NOs:44-55, 80-97, 139-147, 634, 636, 638, 640, 642, 644, 646, 648, 650, 652, 654, 656, 658, 660, 662, 664, 666, 668, 670, 672, 674, 676, 678, and 680. For example, the polypeptide may comprise an amino acid sequence encoded by a polynucleotide having at least 90% (such as at least 91%, 92%, 93%, 94%, 95%, 96%, 97%, 98%, or 99%) identity to one or more of SEQ ID NOs: 44-55, 80-97, 139-147, 634, 636, 638, 640, 642, 644, 646, 648, 650, 652, 654, 656, 658, 660, 662, 664, 666, 668, 670, 672, 674, 676, 678, and 680. For example, the polypeptide may comprise an amino acid sequence encoded by the polynucleotide shown in one or more of SEQ ID NOs:44-55, 80-97, 139-147, 634, 636, 638, 640, 642, 644, 646, 648, 650, 652, 654, 656, 658, 660, 662, 664, 666, 668, 670, 672, 674, 676, 678, and 680.

[0372] In some aspects, the invention is directed to a polypeptide comprising an amino acid sequence of one or more of SEQ ID NOs:198-209, 346 and 348, or an amino acid sequence having at least 90% identity or at least 95% identity to one or more of SEQ ID NOs:198-209, 346 and 348. For example, the polypeptide may comprise an amino acid sequence having at least 90% (such as at least 91%, 92%, 93%, 94%, 95%, 96%, 97%, 98%, or 99%) identity to one or more of SEQ ID NOs:198-209, 346 and 348. For example, the polypeptide may comprise the amino acid sequence of one or more of SEQ ID NOs:198-209, 346 and 348.

[0373] In some aspects, the invention is directed to a polypeptide comprising an amino acid sequence encoded by one or more of SEQ ID NOs:347 and 349-361, or encoded by a polynucleotide having at least 90% identity or at least 95% identity to one or more of SEQ ID NOs:347 and 349-361. For example, the polypeptide may comprise an amino acid sequence encoded by a polynucleotide having at least 90% (such as at least 91%, 92%, 93%, 94%, 95%, 96%, 97%, 98%, or 99%) identity to one or more of SEQ ID NOs: 347 and 349-361. For example, the polypeptide may comprise an amino acid sequence encoded by the polynucleotide shown in one or more of SEQ ID NOs: 347 and 349-361.

[0374] In some aspects, the invention is directed to a polynucleotide encoding an antigen binding polypeptide or antigen binding polypeptide complex (e.g., an antibody or antigen binding fragment thereof) described herein. In other aspects, the invention is directed to a polynucleotide encoding a CAR described herein. As used herein, a “polynucleotide” includes DNA and RNA (e.g., mRNA).

[0375] In some aspects, the invention is directed to a polynucleotide comprising a polynucleotide sequence of one or more of SEQ ID NOs:44-55, 80-97, 139-147, 634, 636, 638, 640, 642, 644, 646, 648, 650, 652, 654, 656, 658, 660, 662, 664, 666, 668, 670, 672, 674, 676, 678, and 680, or a polynucleotide having at least 90% identity or at least 95% identity to one or more of SEQ ID NOs:44-55, 80-97, 139-147, 634, 636, 638, 640, 642, 644, 646, 648, 650, 652, 654, 656, 658, 660, 662, 664, 666, 668, 670, 672, 674, 676, 678, and 680. For example, the polynucleotide may have at least 90% (such as at least 91%, 92%, 93%, 94%, 95%, 96%, 97%, 98%, or 99%) identity to one or more of SEQ ID NOs:44-55, 80-97, 139-147, 634, 636, 638, 640, 642, 644, 646, 648, 650, 652, 654, 656, 658, 660, 662, 664, 666, 668, 670, 672, 674, 676, 678, and 680. For example, the polynucleotide may have the polynucleotide sequence shown in one or more of SEQ ID NOs:44-55, 80-97, 139-147, 634, 636, 638, 640, 642, 644, 646, 648, 650, 652, 654, 656, 658, 660, 662, 664, 666, 668, 670, 672, 674, 676, 678, and 680.

[0376] In some aspects, the invention is directed to a polynucleotide encoding a polypeptide of one or more of SEQ ID NOs:32-43, 62-79, 130-138, 633, 635, 637, 639, 641, 643, 645, 647, 649, 651, 653, 655, 657, 659, 661, 663, 665, 667, 669, 671, 673, 675, 677, and 679, or a polypeptide having at least 90% identity or at least 95% identity to one or more of SEQ ID NOs:32-43, 62-79, 130-138, 633, 635, 637, 639, 641, 643, 645, 647, 649, 651, 653, 655, 657, 659, 661, 663, 665, 667, 669, 671, 673, 675, 677, and 679. For example, the polynucleotide may encode a polypeptide having at least 90% (such as at least 91%, 92%, 93%, 94%, 95%, 96%, 97%, 98%, or 99%) identity to one or more of SEQ ID NOs:32-43, 62-79, 130-138633, 635, 637, 639, 641, 643, 645, 647, 649, 651, 653, 655, 657, 659, 661, 663, 665, 667, 669, 671, 673, 675, 677, and 679. For example, the polynucleotide may encode a polypeptide as shown in one or more of SEQ ID NOs:44-55, 80-97, 139-147, 634, 636, 638, 640, 642, 644, 646, 648, 650, 652, 654, 656, 658, 660, 662, 664, 666, 668, 670, 672, 674, 676, 678, and 680. In some aspects, the invention is directed to polynucleotide encoding a polypeptide comprising an amino acid sequence having at least 90% identity, at least 95% identity, or 100% identity to the amino acid sequence of SEQ ID NOs:32 or 33 that does not contain the eight histidine residues at the C-terminus. For example, the polynucleotide may encode a polypeptide having at least 90% (such as at least 91%, 92%, 93%, 94%, 95%, 96%, 97%, 98%, or 99%) identity to the amino acid sequence of SEQ ID NOs:32 or 33 that does not contain the eight histidine residues at the C-terminus. For example, the polynucleotide may encode a polypeptide as shown in SEQ ID NOs:32 or 33 that does not contain the eight histidine residues at the C-terminus.

[0377] In some aspects, the invention is directed to a polynucleotide having a sequence of one or more of SEQ ID NOs:347 and 349-361, or a polynucleotide having at least 90% identity or at least 95% identity to one or more of SEQ ID NOs:347 and 349-361. For example, the polynucleotide may have at least 90% (such as at least 91%, 92%, 93%, 94%, 95%, 96%, 97%, 98%, or 99%) identity to one or more of SEQ ID NOs: 347 and 349-361. For example, the polynucleotide may have the polynucleotide sequence shown in one or more of SEQ ID NOs: 347 and 349-361.

[0378] In some aspects, the invention is directed to a polynucleotide encoding a polypeptide of one or more of SEQ ID NOs:198-209, 346 and 348, or a polynucleotide encoding a polypeptide having at least 90% identity or at least 95% identity to one or more of SEQ ID NOs:198-209, 346 and 348. For example, the polynucleotide may encode a polypeptide having at least 90% (such as at least 91%, 92%, 93%, 94%, 95%, 96%, 97%, 98%, or 99%) identity to one or more of SEQ ID NOs:198-209, 346 and 348. For example, the polynucleotide may encode a polypeptide as shown in one or more of SEQ ID NOs:198-209, 346 and 348.

[0379] In other aspects, the invention is directed to a vector comprising a polynucleotide described herein.

[0380] In yet other aspects, the invention is directed to a host cell comprising a polynucleotide or vector described herein.

[0381] As used herein, the term “host cell” can be any type of cell, e.g., a primary cell, a cell in culture, or a cell from a cell line. In some aspects, the term “host cell” refers to a cell containing a foreign gene [e.g., a cell subjected to gene delivery or transfected with a polynucleotide (e.g., DNA or mRNA) encoding the gene] transfected with a polynucleotide and the progeny or potential progeny of such a cell. Progeny of such a cell may not be identical to the parent cell transfected with the nucleic acid molecule, e.g., due to mutations or environmental influences that may occur in succeeding generations or integration of the nucleic acid molecule into the host cell genome.

[0382] In other aspects, the invention is directed to an immune cell expressing a CAR of the invention or a polynucleotide or vector encoding a CAR of the invention. In some aspects, the immune cell is a neutrophil, eosinophil, basophil, mast cell, monocyte, macrophage, dendritic cell, natural killer cell, or lymphocyte (B cell or T cell).

[0383] Methods which are well known to those skilled in the art can be used to construct vectors encoding antigen binding polypeptides and antigen binding polypeptide complexes (e.g., CDR, VH, VL, heavy chain and/or light chain coding sequences and appropriate transcriptional and translational control signals). These methods include, for example, in vitro recombinant DNA techniques, synthetic techniques, and in vivo genetic recombination.

[0384] A vector can be transferred to a host cell by conventional techniques and the resulting cells can then be cultured by conventional techniques to produce an antigen binding polypeptide or antigen binding polypeptide complex comprising, e.g., six CDRs, VH, VL, VH and VL, heavy chain, light chain, or heavy and light chain, or a domain thereof (e.g., one or more CDRs, VH, VL, VH and VL, heavy chain, or light chain). Thus, provided herein are host cells containing a polynucleotide encoding an antigen binding polypeptide or antigen binding polypeptide complex comprising, e.g., comprising six CDRs, VH, VL, VH and VL, heavy chain, light chain, or heavy and light chain, or a domain thereof (e.g., one or more CDRs, VH, VL, VH and VL, heavy chain, or light chain), operably linked to a promoter for expression of such sequences in the host cell. In some aspects, vectors encoding both heavy and light chains, or a domain thereof, individually, can be co-expressed in the host cell for expression. In some aspects, a host cell contains a vector comprising a polynucleotide encoding both a heavy chain and light chain, or a domain thereof. In some aspects, a host cell contains two different vectors, a first vector comprising a polynucleotide encoding a heavy chain or a domain thereof, and a second vector comprising a polynucleotide encoding a light chain or a domain thereof. In some aspects, a first host cell comprises a first vector comprising a polynucleotide encoding a heavy chain or a domain thereof, and a second host cell comprises a second vector comprising a polynucleotide encoding a light chain or a domain thereof. In some aspects, provided herein is a population of host cells comprising such a first host cell and such a second host cell.

[0385] In some aspects, provided herein is a population of vectors comprising a first vector comprising a polynucleotide encoding a light chain or domain thereof, and a second vector comprising a polynucleotide encoding a heavy chain or domain thereof. Alternatively, a single vector can be used which encodes, and is capable of expressing, both heavy and light chain polypeptides or a domain thereof.

[0386] A variety of host-vector systems can be utilized to express the polypeptides and polypeptide complexes described herein. Such host-vector systems represent vehicles by which the coding sequences of interest can be produced and subsequently purified, but also represent cells which can, when transformed or transfected with the appropriate nucleotide coding sequences, express a polypeptide or polypeptide complex described herein in situ. These include but are not limited to microorganisms such as bacteria (e.g., E. coli and B. subtilis) transformed with recombinant bacteriophage DNA, plasmid DNA or cosmid DNA expression vectors containing antibody coding sequences; yeast (e.g., Saccharomyces pichia) transformed with recombinant yeast expression vectors containing antibody coding sequences; insect cell systems infected with recombinant virus expression vectors (e.g., baculovirus) containing antibody coding sequences; plant cell systems (e.g., green algae such as Chlamydomonas reinhardtii) infected with recombinant virus expression vectors (e.g., cauliflower mosaic virus, CaMV; tobacco mosaic virus, TMV) or transformed with recombinant plasmid expression vectors (e.g., Ti plasmid) containing antibody coding sequences; or mammalian cell systems (e.g., COS (e.g., COS1 or COS), CHO, BHK, MDCK, HEK 293, NS0, PER.C6, VERO, CRL7O3O, HsS78Bst, HeLa, and NIH 3T3, HEK-293T, HepG2, SP210, R1.1, B-W, L-M, BSC1, BSC40, YB/20, and BMT10 cells) harboring recombinant expression constructs containing promoters derived from the genome of mammalian cells (e.g., metallothionein promoter) or from mammalian viruses (e.g., the adenovirus late promoter; the vaccinia virus 7.5K promoter). In some aspects, cells for expressing polypeptide or polypeptide complexes described herein are CHO cells, for example CHO cells from the CHO GS System™ (Lonza). In some aspects, cells for expressing polypeptides or polypeptide complexes of the invention are human cells, e.g., human cell lines. In some aspects, a mammalian expression vector is pOptiVEC™ or pcDNA3.3. In some aspects, bacterial cells such as Escherichia coli, or eukaryotic cells (e.g., mammalian cells) are used for the expression of recombinant polypeptides. For example, mammalian cells such as Chinese hamster ovary (CHO) cells in conjunction with a vector such as the major intermediate early gene promoter element from human cytomegalovirus is an effective expression system for polypeptides (Foecking M K & Hofstetter H (1986) Gene 45: 101-105; and Cockett M I et al., (1990) Biotechnology 8: 662-667). In some aspects, polypeptides or polypeptide complexes described herein are produced by HEK-293T cells.

[0387] In addition, a host cell strain can be chosen which modulates the expression of the inserted sequences, or modifies and processes the gene product in the specific fashion desired. Such modifications (e.g., glycosylation) and processing (e.g., cleavage) of protein products can contribute to the function of the protein. To this end, eukaryotic host cells which possess the cellular machinery for proper processing of the primary transcript, glycosylation, and phosphorylation of the gene product can be used. Such mammalian host cells include but are not limited to CHO, VERO, BHK, Hela, MDCK, HEK 293, NIH 3T3, W138, BT483, Hs578T, HTB2, BT2O and T47D, NS0 (a murine myeloma cell line that does not endogenously produce any immunoglobulin chains), CRL7O3O, COS (e.g., COS1 or COS), PER.C6, VERO, HsS78Bst, HEK-293T, HepG2, SP210, R1.1, B-W, L-M, BSC1, BSC40, YB/20, BMT10 and HsS78Bst cells.

[0388] Once a polypeptide or polypeptide complex described herein has been produced by recombinant expression, it can be purified by any method known in the art for purification of a protein or immunoglobulin molecule, for example, by chromatography (e.g., ion exchange, affinity, particularly by affinity for the specific antigen after Protein A, and size exclusion chromatography), centrifugation, differential solubility, or by any other standard technique for the purification of proteins. Further, the polypeptides or polypeptide complexes described herein can be fused to heterologous polypeptide sequences described herein (e.g., peptide tags) or otherwise known in the art to facilitate purification.

[0389] In some aspects, a polypeptide or polypeptide complex described herein is isolated or purified. Generally, an isolated polypeptide or polypeptide complex is one that is substantially free of other polypeptides or polypeptide complexes with different antigenic specificities. For example, in some aspects, a preparation of a polypeptide or polypeptide complex described herein is substantially free of cellular material and/or chemical precursors.

### Pharmaceutical Compositions and Kits

[0390] In some aspects, the invention is directed to a pharmaceutical composition comprising an antigen binding polypeptide, antigen binding polypeptide complex (e.g., antibody or antigen binding fragment thereof), polypeptide, polynucleotide, vector, CAR or cell described herein.

[0391] In some aspects, the invention is directed to a pharmaceutical composition comprising (1) an antigen binding polypeptide, antigen binding polypeptide complex (e.g., antibody or antigen binding fragment thereof), polynucleotide, vector, CAR or cell described herein, and (2) a pharmaceutically acceptable carrier. The term “pharmaceutically acceptable carrier” includes any and all solvents, co-solvents, complexing agents, dispersion media, coatings, antibacterial and antifungal agents, isotonic and absorption delaying agents, and the like, which are not biologically or otherwise undesirable. The use of such media and agents for pharmaceutically active substances is known in the art. Except insofar as any conventional media or agent is incompatible with the active ingredient, its use in the therapeutic formulations is contemplated. Supplementary active ingredients can also be incorporated into the pharmaceutical compositions of the invention. In addition, various excipients, such as are commonly used in the art, can be included. These and other such compounds are described in the literature, e.g., in the Merck Index, Merck & Company, Rahway, N.J. Considerations for the inclusion of various components in pharmaceutical compositions are described, e.g., in Gilman et al. (Eds.) (2010); Goodman and Gilman's. The Pharmacological Basis of Therapeutics, 12th Ed., The McGraw-Hill Companies. In some aspects, the pharmaceutical composition is for parenteral, intravenous or subcutaneous administration.

[0392] In some aspects, the invention is directed to a kit comprising an antigen binding polypeptide, antigen binding polypeptide complex (e.g., antibody or antigen binding fragment thereof), polypeptide, polynucleotide, vector, cell, CAR or pharmaceutical composition described herein, or a combination thereof. Once a pharmaceutical composition has been formulated, it can be stored in sterile vials as a solution, suspension, gel, emulsion, solid, crystal, or as a dehydrated or lyophilized powder. Such formulations may be stored either in a ready-to-use form or in a form (e.g., lyophilized) that is reconstituted prior to administration. In some aspects, the invention provides kits for producing a single-dose administration unit. In some aspects, the kits of the invention can contain both a first container having a dried protein and a second container having an aqueous formulation. In some aspects, kits containing single and multi-chambered pre-filled syringes (e.g., liquid syringes and lyosyringes) are also provided. In some aspects, the kit contains components for intravenous or subcutaneous administration.

### Methods of Use

[0393] In some aspects, the invention is directed to certain methods of use of an antigen binding polypeptide, antigen binding polypeptide complex (e.g., an antibody or antigen binding fragment thereof), polypeptide, polynucleotide, vector, cell, CAR, or pharmaceutical composition described herein, or a combination thereof. Any of the antigen binding polypeptide structures and any of the antigen binding polypeptide complex structures described herein targeting one or more of the targets described herein may be used in any of the methods and uses of the invention.

[0394] In some aspects, the antigen binding polypeptides or antigen binding polypeptide complexes (e.g., antibodies or antigen binding fragments thereof) specifically binds to two, three or four of A2AR, APRIL, ATPDase, BAFF, BAFFR, BCMA, BlyS, BTK, BTLA, B7DC, B7H1, B7H2, B7H3, B7H4, B7H5, B7H6, B7H7, B7RP1, B7-4, C3, C5, CCL2, CCL3, CCL4, CCL5, CCL7, CCL8, CCL11, CCL15, CCL17, CCL19, CCL20, CCL21, CCL25 CCR3, CCR4, CD3, CD16A, CD19, CD20, CD24, CD27, CD28, CD30, CD38, CD39, CD40, CD40L, CD47, CD52, CD70, CD80, CD86, CD123, CD133, CD137, CD137L, CD160, CD272, CEACAM5, CLEC9, CLEC91, CRTH2, CSF-1, CSF-2, CSF-3, CXCL1, CXCL2, CXCL4, CXCL12, CXCL13, CXCR3, cMet, CTLA4, DLL3, DLL4, DNGR-1, E-cadherin, EGFR, ENTPD1, EpCAM, FCER1, FCER1A, FCER2, FGFR, FLAP, FOLH1, Gi24, GITR, GITRL, GPR5, GP100, GPRC5D, HER2, HER3, ICOSL, ICOS, HHLA2, HMGB1, HVEM, IDO, IFNa, IgE, IGF1R, IL2Rbeta, IL1, ILIA, IL1B, IL1F10, IL2, IL4, IL4Ra, IL5, IL5R, IL6, IL7, IL7Ra, IL8, IL9, IL9R, IL10, rhIL1O, IL12, IL13, IL13Ra1, IL13Ra2, IL15, IL17, IL17Rb, IL18, IL22, IL23, IL25, IL7, IL33, IL35, ITGB4, ITK, KIR, LAG3, LAMP1, leptin, LPFS2, MHC class II, MUC-1, MUC-16, NCR3LG1, NKG2D, NKp46, NTPDase-1, OX40, OX40L, PD-1, PD-L1, PD-L2, PROM1, S152, SIRPalpha, SISP1, SLC, SPG64, ST2, STEAP1, STEAP2, Syk kinase, STEAP1, TROP2, TACI, TDO, TGFBETA, T14, TIGIT, TIM3, TLR, TLR2, TLR4, TLR5, TLR9, TMEF1, TNFa, TNFRSF7, Tp55, TREM1, TSLP, TSLPR, TWEAK, VEGF, VISTA, Vstm3, and WUCAM. As described herein, the VL1, VL2, VL3, VL4, VH1, VH2, VH3, and/or VH4 of the antigen binding polypeptide or polypeptide comprised within the antigen binding polypeptide complex may specifically bind to one or more of A2AR, APRIL, ATPDase, BAFF, BAFFR, BCMA, BlyS, BTK, BTLA, B7DC, B7H1, B7H2, B7H3, B7H4, B7H5, B7H6, B7H7, B7RP1, B7-4, C3, C5, CCL2, CCL3, CCL4, CCL5, CCL7, CCL8, CCL11, CCL15, CCL17, CCL19, CCL20, CCL21, CCL25 CCR3, CCR4, CD3, CD16A, CD19, CD20, CD24, CD27, CD28, CD30, CD38, CD39, CD40, CD40L, CD47, CD52, CD70, CD80, CD86, CD123, CD133, CD137, CD137L, CD160, CD272, CEACAM5, CLEC9, CLEC91, CRTH2, CSF-1, CSF-2, CSF-3, CXCL1, CXCL2, CXCL4, CXCL12, CXCL13, CXCR3, cMet, CTLA4, DLL3, DLL4, DNGR-1, E-cadherin, EGFR, ENTPD1, EpCAM, FCER1, FCER1A, FCER2, FGFR, FLAP, FOLH1, Gi24, GITR, GITRL, GPR5, GP100, GPRC5D, HER2, HER3, ICOSL, ICOS, HHLA2, HMGB1, HVEM, IDO, IFNa, IgE, IGF1R, IL2Rbeta, IL1, ILIA, IL1B, IL1F10, IL2, IL4, IL4Ra, IL5, IL5R, IL6, IL7, IL7Ra, IL8, IL9, IL9R, IL10, rhIL1O, IL12, IL13, IL13Ra1, IL13Ra2, IL15, IL17, IL17Rb, IL18, IL22, IL23, IL25, IL7, IL33, IL35, ITGB4, ITK, KIR, LAG3, LAMP1, leptin, LPFS2, MHC class II, MUC-1, MUC-16, NCR3LG1, NKG2D, NKp46, NTPDase-1, OX40, OX40L, PD-1, PD-L1, PD-L2, PROM1, S152, SIRPalpha, SISP1, SLC, SPG64, ST2, STEAP1, STEAP2, Syk kinase, STEAP1, TROP2, TACI, TDO, TGFBETA, T14, TIGIT, TIM3, TLR, TLR2, TLR4, TLR5, TLR9, TMEF1, TNFa, TNFRSF7, Tp55, TREM1, TSLP, TSLPR, TWEAK, VEGF, VISTA, Vstm3, and WUCAM. For example, the antigen binding polypeptide or antigen binding polypeptide complex (e.g., antibodies or antigen binding fragments thereof) may specifically bind to CD3, CD28, CD38 and CD19. For example, the antigen binding polypeptide or antigen binding polypeptide complex (e.g., antibodies or antigen binding fragments thereof) may specifically bind to CD3, CD28, Trop2 and cMet. For example, the antigen binding polypeptide or antigen binding polypeptide complex (e.g., antibodies or antigen binding fragments thereof) may specifically bind to CD3, CD28, CD19 and CD20. Any of the antigen binding polypeptide structures and any of the antigen binding polypeptide complex structures described herein may be used to target one or more of the targets described herein in the methods and uses of the invention.

[0395] CD3 (Cluster of Differentiation 3) is a protein complex and T cell co-receptor that is involved in activating both the cytotoxic T cell (CD8+ naive T cells) and T helper cells (CD4+ naive T cells).

[0396] CD19 (Cluster of Differentiation 19, also known as B-Lymphocyte Surface Antigen B4, T Cell Surface Antigen Leu-12 and CVID3) is a transmembrane protein expressed in all B lineage cells. CD19 plays two major roles in human B cells: on the one hand, it acts as an adaptor protein to recruit cytoplasmic signaling proteins to the membrane; on the other, it works within the CD19/CD21 complex to decrease the threshold for B cell receptor signaling pathways. Due to its presence on all B cells, it is a biomarker for B lymphocyte development, lymphoma diagnosis and can be utilized as a target for leukemia immunotherapies.

[0397] CD28 (Cluster of Differentiation 28) is one of the proteins expressed on T cells that provide co-stimulatory signals required for T cell activation and survival. T cell stimulation through CD28 in addition to the T Cell Receptor (TCR) can provide a potent signal for the production of various interleukins (IL-6 in particular).

[0398] CD38 (Cluster of Differentiation 38, also known as cyclic ADP ribose hydrolase) is a glycoprotein found on the surface of many immune cells (white blood cells), including CD4+, CD8+, B lymphocytes and natural killer cells. CD38 also functions in cell adhesion, signal transduction and calcium signaling.

[0399] Her2 (Human Epidermal Growth Factor Receptor 2, also known as Her2/neu, Erb-B2, or CD340) is a member of the human epidermal growth factor receptor family. Amplification or overexpression of Her2 has been shown to play an important role in the development and progression of certain types of breast cancer.

[0400] cMet, also called membrane tyrosine-protein kinase Met or hepatocyte growth factor receptor (HGFR), is a protein that in humans is encoded by the MET gene. MET is a single pass tyrosine kinase receptor essential for embryonic development, organogenesis and wound healing. Abnormal MET activation in cancer correlates with poor prognosis, where aberrantly active MET triggers tumor growth, formation of new blood vessels (angiogenesis) that supply the tumor with nutrients, and cancer spread to other organs (metastasis).

[0401] Tumor-associated calcium signal transducer 2 is also known as Trop2 and epithelial glycoprotein-1 antigen (EGP-1). It is a protein that in humans is encoded by the TACSTD2 gene. Trop2 plays a role in tumor progression by actively interacting with several key molecular signaling pathways traditionally associated with cancer development and progression. Aberrant overexpression of Trop-2 has been described in several solid cancers, such as colorectal, renal, lung, and breast cancers. Trop-2 expression has also been described in some rare and aggressive malignancies, e.g., salivary duct, anaplastic thyroid, uterine/ovarian, and neuroendocrine prostate cancers.

[0402] B-lymphocyte antigen CD20 (CD20) is expressed on the surface of B cells beginning at the pro-B phase and progressively increasing in concentration until maturity. In humans CD20 is encoded by the MS4A1 gene. This gene encodes a member of the membrane-spanning 4A gene family. It is found on B cell lymphomas, hairy cell leukemia, B cell chronic lymphocytic leukemia, and melanoma cancer stem cells.

[0403] Receptor tyrosine-protein kinase erbB-3, also known as Her3 (human epidermal growth factor receptor 3), is a membrane bound protein that in humans is encoded by the ERBB3 gene. EibB3 is a member of the epidermal growth factor receptor (EGFR/ERBB) family of receptor tyrosine kinases ErbB3 as a heterodimerization partner, most critically with ErbB2, is implicated in growth, proliferation, chemotherapeutic resistance, and the promotion of invasion and metastasis. ErbB3 is associated with targeted therapeutic resistance in numerous cancers.

[0404] The adenosine A2A receptor, also known as A2AR or ADORA2A, is an adenosine receptor. This protein is a member of the G protein-coupled receptor (GPCR) family which possess seven transmembrane alpha helices, as well as an extracellular N-terminus and an intracellular C-terminus.

[0405] A proliferation-inducing ligand (APRIL), also known as tumor necrosis factor ligand superfamily member 13 (TNFSF13), is a protein of the TNF superfamily recognized by the cell surface receptor TACI. It is a member of the tumor necrosis factor ligand (TNF) ligand family. This protein is a ligand for TNFRSF17/BCMA, a member of the TNF receptor family. This protein and its receptor are both found to be important for B cell development.

[0406] The epidermal growth factor receptor (EGFR; ErbB-1; HER1 in humans) is a transmembrane protein that is a receptor for members of the epidermal growth factor family (EGF family) of extracellular protein ligands. The epidermal growth factor receptor is a member of the ErbB family of receptors, a subfamily of four closely related receptor tyrosine kinases. EGFR (ErbB-1), HER2/neu (EibB-2), Her 3 (ErbB-3) and Her 4 (ErbB-4). In many cancer types, mutations affecting EGFR expression or activity could result in cancer.

[0407] Fibroblast growth factor receptor (FGFR) is a receptor that binds to members of the fibroblast growth factor (FGF) family of proteins. The FGF/FGFR signalling pathway is involved in a variety of cancers.

[0408] B-cell activating factor (BAFF), also known as tumor necrosis factor ligand superfamily member 13B, is a protein that in humans is encoded by the TNFSF13B gene. BAFF is also known as B Lymphocyte Stimulator (BLyS) and TNF- and APOL-related leukocyte expressed ligand (TALL-1) and the Dendritic cell-derived TNF-like molecule (CD257 antigen; cluster of differentiation 257). BAFF is a cytokine that belongs to the tumor necrosis factor (TNF) ligand family. This cytokine is a ligand for receptors TNFRSF13B/TACI, TNFRSF17/BCMA, and TNFRSF13C/BAFF-R. This cytokine is expressed in B cell lineage cells, and acts as a potent B cell activator. It has been also shown to play an important role in the proliferation and differentiation.

[0409] BAFF receptor (B-cell activating factor receptor, BAFF-R), also known as tumor necrosis factor receptor superfamily member 13C (TNFRSF13C) and BLyS receptor 3 (BR3), is a membrane protein of the TNF receptor superfamily which recognizes BAFF, an essential factor for B cell maturation and survival. In humans it is encoded by the TNFRSF13C gene. BAFF enhances B-cell survival in vitro and is a regulator of the peripheral B-cell population.

[0410] B-cell maturation antigen (BCMA or BCM), also known as tumor necrosis factor receptor superfamily member 17 (TNFRSF17), is a protein that in humans is encoded by the TNFRSF17 gene. TNFRSF17 is a cell surface receptor of the TNF receptor superfamily which recognizes BAFF. Serum B-cell maturation antigen (sBCMA) is the cleaved form of BCMA, found at low levels in the serum of normal patients and generally elevated in patients with multiple myeloma (MM).

[0411] Bruton's tyrosine kinase (BTK), also known as tyrosine-protein kinase BTK, is a tyrosine kinase that is encoded by the BTK gene in humans BTK plays a crucial role in B cell development as it is required for transmitting signals from the pre-B cell receptor that forms after successful immunoglobulin heavy chain rearrangement. It also has a role in mast cell activation through the high-affinity IgE receptor.

[0412] B- and T-lymphocyte attenuator or BTLA (also known as cluster of differentiation 272 or CD272) is a protein that belongs to the CD28 immunoglobulin superfamily (IgSF) which is encoded by the BTLA gene. Its discovered ligand herpes virus entry mediator or HVEM (also known as tumour necrosis factor receptor superfamily member 14 or TNFRSF14) belongs to the tumor necrosis factor receptor superfamily (TNFRSF). In many cases BTLA expression is connected with unfavourable outcomes as it, for instance, inhibits the function of human CD8+ cancer-specific T cells.

[0413] Programmed cell death 1 ligand 2 (also known as PDL2 or B7DC) is a protein that in humans is encoded by the PDCD1LG2 gene. PDCD1LG2 has also been designated as CD273 (cluster of differentiation 273). PDCD1LG2 is an immune checkpoint receptor ligand which plays a role in negative regulation of the adaptive immune response. PD-L2 is one of two known ligands for Programmed cell death protein 1 (PD-1). PD-L2, PD-L1, and PD-1 expressions are important in the immune response to certain cancers.

[0414] Programmed death-ligand 1 (PD-L1) also known as cluster of differentiation 274 (CD274) or B7 homolog 1 (B7-H1) is a protein that in humans is encoded by the CD274 gene. It is a 40 kDa type 1 transmembrane protein that has been speculated to play a major role in suppressing the adaptive arm of immune systems during particular events. The binding of PD-L1 to the inhibitory checkpoint molecule PD-1 transmits an inhibitory signal based on interaction with phosphatases (SHP-1 or SHP-2) via Immunoreceptor Tyrosine-Based Switch Motif (ITSM). This reduces the proliferation of antigen-specific T-cells in lymph nodes, while simultaneously reducing apoptosis in regulatory T cells (anti-inflammatory, suppressive T cells)—further mediated by a lower regulation of the gene Bcl-2. Upregulation of PD-L1 may allow cancers to evade the host immune system.

[0415] V-set domain-containing T-cell activation inhibitor 1 (also known as B7H4) is a protein that in humans is encoded by the VTCN1 gene. B7H4 belongs to the B7 family of costimulatory proteins. These proteins are expressed on the surface of antigen-presenting cells and interact with ligands (e.g., CD28; MIM 186760) on T lymphocytes. B7H4 is an immune checkpoint molecule.

[0416] Delta-like 3 (Drosophila), also known as DLL3, is a protein which in humans is encoded by the DLL3 gene.

[0417] Ectonucleoside triphosphate diphosphohydrolase-1 (gene: ENTPD1; protein: NTPDase1), also known as CD39 (Cluster of Differentiation 39), is a typical cell surface enzyme with a catalytic site on the extracellular face. NTPDase1 is an ectonucleotidase that catalyse the hydrolysis of γ- and β-phosphate residues of triphospho- and diphosphonucleosides to the monophosphonucleoside derivative. NTPDase1 hydrolyzes P2 receptor ligands, namely ATP, ADP, UTP and UDP with similar efficacy. NTPDase1 can therefore affect P2 receptor activation and functions.

[0418] Fc fragment of IgE, high affinity I, receptor for; alpha polypeptide, also known as FCER1A, is a protein which in humans is encoded by the FCER1A gene. The high affinity IgE receptor plays a central role in allergic disease, coupling allergen and mast cell to initiate the inflammatory and immediate hypersensitivity responses that are characteristic of disorders such as hay fever and asthma.

[0419] The high-affinity IgE receptor, also known as FCER1, or Fc epsilon RI, is the high-affinity receptor for the Fc region of immunoglobulin E, an antibody isotype involved in the allergy disorder and parasites immunity FCER1 is a tetrameric receptor complex that binds Fc portion of the E heavy chain of IgE. It is constitutively expressed on mast cells and basophils and is inducible in eosinophils.

[0420] Arachidonate 5-lipoxygenase-activating protein also known as 5-lipoxygenase activating protein, or FLAP, is a protein that in humans is encoded by the ALOX5AP gene. FLAP is necessary for the activation of 5-lipoxygenase and therefore for the production of leukotrienes, 5-hydroxyeicosatetraenoic acid, 5-oxo-eicosatetraenoic acid, and specialized pro-resolving mediators of the lipoxin and resolvin classes. Leukotrienes, which need the FLAP protein to be made, have an established pathological role in allergic and respiratory diseases.

[0421] Glutamate carboxypeptidase II (GCPII), also known as N-acetyl-L-aspartyl-L-glutamate peptidase I (NAALADase I), NAAG peptidase, or prostate-specific membrane antigen (PSMA) is an enzyme that in humans is encoded by the FOLH1 (folate hydrolase 1) gene. Human GCPII contains 750 amino acids and weighs approximately 84 kDa. Human FOLH1 is highly expressed in the prostate, roughly a hundred times greater than in most other tissues. In some prostate cancers, PSMA is the second-most upregulated gene product, with an 8- to 12-fold increase over levels in noncancerous prostate cells. In vitro studies using prostate and breast cancer cell lines with decreased FOLH1 levels showed a significant decrease in the proliferation, migration, invasion, adhesion and survival of the cells.

[0422] Mucin 1, cell surface associated (MUC1), also called polymorphic epithelial mucin (PEM) or epithelial membrane antigen or EMA, is a mucin encoded by the MUC1 gene in humans. The ability of chemotherapeutic drugs to access the cancer cells is inhibited by the heavy glycosylation in the extracellular domain of MUC1.

[0423] CD133 antigen, also known as prominin-1, is a glycoprotein that in humans is encoded by the PROM1 gene. It is a member of pentaspan transmembrane glycoproteins, which specifically localize to cellular protrusions. CD133 is expressed in hematopoietic stem cells, endothelial progenitor cells, glioblastoma, neuronal and glial stem cells, various pediatric brain tumors, as well as adult kidney, mammary glands, trachea, salivary glands, uterus, placenta, digestive tract, testes, and some other cell types.

[0424] Mucin-16 (MUC-16), also known as Ovarian cancer-related tumor marker CA125, is a protein that in humans is encoded by the MUC16 gene. MUC-16 is a member of the mucin family glycoproteins. MUC-16 has found application as a tumor marker or biomarker that may be elevated in the blood of some patients with specific types of cancers, most notably ovarian cancer, or other conditions that are benign.

[0425] Lysosomal-associated membrane protein 1 (LAMP1) also known as lysosome-associated membrane glycoprotein 1 and CD107a (Cluster of Differentiation 107a), is a protein that in humans is encoded by the LAMP1 gene. LAMP1 is a type I transmembrane protein which is expressed at high or medium levels in many different normal tissue cell types. It resides primarily across lysosomal membranes, and functions to provide selectins with carbohydrate ligands LAMP1 has also been shown to be a marker of degranulation on lymphocytes such as CD8+ and NK cells and may also play a role in tumor cell differentiation and metastasis.

[0426] Programmed death-ligand 1 (PD-L1), also known as cluster of differentiation 274 (CD274) or B7 homolog 1 (B7-H1), is a protein that in humans is encoded by the CD274 gene. Upregulation of PD-L1 may allow cancers to evade the host immune system.

[0427] Carcinoembryonic antigen-related cell adhesion molecule 1 (biliary glycoprotein) (CEACAM1), also known as CD66a (Cluster of Differentiation 66a), is a human glycoprotein, and a member of the carcinoembryonic antigen (CEA) gene family.

[0428] Metalloreductase STEAP1 is an enzyme that in humans is encoded by the STEAP1 gene. This gene is predominantly expressed in prostate tissue, and is found to be upregulated in multiple cancer cell lines. The gene product is predicted to be a six-transmembrane protein, and was shown to be a cell surface antigen significantly expressed at cell-cell junctions.

[0429] Epithelial cell adhesion molecule (EpCAM) is a transmembrane glycoprotein mediating calcium-independent homotypic cell-cell adhesion in epithelia. EpCAM is also involved in cell signaling, migration, proliferation, and differentiation Additionally, EpCAM has oncogenic potential via its capacity to upregulate c-myc, e-fabp, and cyclins A & E. Since EpCAM is expressed exclusively in epithelia and epithelial-derived neoplasms, EpCAM can be used as diagnostic marker for various cancers.

[0430] In some aspects, the antigen binding polypeptides or antigen binding polypeptide complexes (e.g., antibodies or antigen binding fragments thereof) specifically bind a viral peptide, protein, polypeptide, or a fragment thereof. In some aspects, the viral peptide, protein, polypeptide, or a fragment thereof is selected from influenza virus neuraminidase, influenza virus hemagglutinin, human respiratory syncytial virus (RSV)-viral proteins, RSV F glycoprotein, RSV G glycoprotein, herpes simplex virus (HSV) viral proteins, herpes simplex virus glycoproteins gB, gC, gD, and gE, Chlamydia MOMP and PorB antigens, core protein, matrix protein or other protein of Dengue virus, measles virus hemagglutinin, herpes simplex virus type 2 glycoprotein gB, poliovirus 1 VP1, envelope glycoproteins of HIV 1, hepatitis B surface antigen, diptheria toxin, Streptococcus 24M epitope, gonococcal pilin, pseudorabies virus g50 (gpD), pseudorabies virus II (gpB), pseudorabies virus III (gpC), pseudorabies virus glycoprotein H, pseudorabies virus glycoprotein E, transmissible gastroenteritis glycoprotein 195, transmissible gastroenteritis matrix protein, swine rotavirus glycoprotein 38, swine parvovirus capsid protein, Semulinahydodysenteriae protective antigen, bovine viral diarrhea glycoprotein 55, Newcastle disease virus hemagglutinin-neuraminidase, swine flu hemagglutinin, swine flu neuraminidase, foot and mouth disease virus, hog colera virus, swine influenza virus, African swine fever virus, Mycoplasma liyopneutiioniae, infectious bovine rhinotracheitis virus, infectious bovine rhinotracheitis virus glycoprotein E, glycoprotein G, infectious laryngotracheitis virus, infectious laryngotracheitis virus glycoprotein G or glycoprotein I, a glycoprotein of La Crosse virus, neonatal calf diarrhoea virus, Venezuelan equine encephalomyelitis virus, punta toro virus, murine leukemia virus, mouse mammary tumor virus, hepatitis B virus core protein and hepatitis B virus surface antigen or a fragment or derivative thereof, antigen of equine influenza virus or equine herpes virus, including equine influenza virus type A/Alaska 91 neuraminidase, equine influenza virus typeA/Miami 63 neuraminidase, equine influenza virus type A/Kentucky 81 neuraminidase equine herpes virus type 1 glycoprotein B, and equine herpes virus type 1 glycoprotein D, antigen of bovine respiratory syncytial virus or bovine parainfluenza virus, bovine respiratory syncytial virus attachment protein (BRSV G), bovine respiratory syncytial virus fusion protein (BRSV F), bovine respiratory syncytial virus nucleocapsid protein (BRSVN), bovine parainfluenza virus type 3 fusion protein, bovine parainfluenza virus type 3 hemagglutinin neuraminidase, bovine E viral diarrhoea virus glycoprotein 48 and glycoprotein 53, glycoprotein E of Dengue virus, and glycoprotein ElE2 of human hepatitis C virus. As described herein, the VL1, VL2, VL3, VL4, VH1, VH2, VH3, and/or VH4 of the antigen binding polypeptide or polypeptide comprised within the antigen binding polypeptide complex may specifically bind to one or more viral peptide, protein, polypeptide, or a fragment thereof such as an influenza virus neuraminidase, influenza virus hemagglutinin, human respiratory syncytial virus (RSV)-viral proteins, RSV F glycoprotein, RSV G glycoprotein, herpes simplex virus (HSV) viral proteins, herpes simplex virus glycoproteins gB, gC, gD, and gE, Chlamydia MOMP and PorB antigens, core protein, matrix protein or other protein of Dengue virus, measles virus hemagglutinin, herpes simplex virus type 2 glycoprotein gB, poliovirus 1 VP1, envelope glycoproteins of HIV 1, hepatitis B surface antigen, diptheria toxin, Streptococcus 24M epitope, gonococcal pilin, pseudorabies virus g50 (gpD), pseudorabies virus II (gpB), pseudorabies virus III (gpC), pseudorabies virus glycoprotein H, pseudorabies virus glycoprotein E, transmissible gastroenteritis glycoprotein 195, transmissible gastroenteritis matrix protein, swine rotavirus glycoprotein 38, swine parvovirus capsid protein, Serpulinahydodysenteriae protective antigen, bovine viral diarrhea glycoprotein 55, Newcastle disease virus hemagglutinin-neuraminidase, swine flu hemagglutinin, swine flu neuraminidase, foot and mouth disease virus, hog colera virus, swine influenza virus, African swine fever virus, Mycoplasma liyopneutiioniae, infectious bovine rhinotracheitis virus, infectious bovine rhinotracheitis virus glycoprotein E, glycoprotein G, infectious laryngotracheitis virus, infectious laryngotracheitis virus glycoprotein G or glycoprotein I, a glycoprotein of La Crosse virus, neonatal calf diarrhoea virus, Venezuelan equine encephalomyelitis virus, punta toro virus, murine leukemia virus, mouse mammary tumor virus, hepatitis B virus core protein and hepatitis B virus surface antigen or a fragment or derivative thereof, antigen of equine influenza virus or equine herpes virus, including equine influenza virus type A/Alaska 91 neuraminidase, equine influenza virus typeA/Miami 63 neuraminidase, equine influenza virus type A/Kentucky 81 neuraminidase equine herpes virus type 1 glycoprotein B, and equine herpes virus type 1 glycoprotein D, antigen of bovine respiratory syncytial virus or bovine parainfluenza virus, bovine respiratory syncytial virus attachment protein (BRSV G), bovine respiratory syncytial virus fusion protein (BRSV F), bovine respiratory syncytial virus nucleocapsid protein (BRSVN), bovine parainfluenza virus type 3 fusion protein, bovine parainfluenza virus type 3 hemagglutinin neuraminidase, bovine E viral diarrhoea virus glycoprotein 48 and glycoprotein 53, glycoprotein E of Dengue virus, glycoprotein ElE2 of human hepatitis C virus or a combination thereof. Any of the antigen binding polypeptide structures and any of the antigen binding polypeptide complex structures described herein may be used to target one or more of the viral targets described herein in the methods and uses of the invention. In some aspects, the antigen binding polypeptide or antigen binding polypeptide complex (e.g., antibodies or antigen binding fragments thereof) specifically binds to a viral peptide, protein, polypeptide, or a fragment of influenza virus neuraminidase. In some aspects, the antigen binding polypeptide or antigen binding polypeptide complex (e.g., antibodies or antigen binding fragments thereof) specifically binds to a viral peptide, protein, polypeptide, or a fragment of influenza virus hemagglutinin. In some aspects, the antigen binding polypeptide or antigen binding polypeptide complex (e.g., antibodies or antigen binding fragments thereof) specifically binds to a viral peptide, protein, polypeptide, or a fragment of a human respiratory syncytial virus (RSV)-viral protein. In some aspects, the antigen binding polypeptide or antigen binding polypeptide complex (e.g., antibodies or antigen binding fragments thereof) specifically binds to a viral peptide, protein, polypeptide, or a fragment of RSV F glycoprotein. In some aspects, the antigen binding polypeptide or antigen binding polypeptide complex (e.g., antibodies or antigen binding fragments thereof) specifically binds to a viral peptide, protein, polypeptide, or a fragment of RSV G glycoprotein. In some aspects, the antigen binding polypeptide or antigen binding polypeptide complex (e.g., antibodies or antigen binding fragments thereof) specifically binds to a viral peptide, protein, polypeptide, or a fragment of a herpes simplex virus (HSV) viral protein. In some aspects, the antigen binding polypeptide or antigen binding polypeptide complex (e.g., antibodies or antigen binding fragments thereof) specifically binds to a viral peptide, protein, polypeptide, or a fragment of the herpes simplex virus glycoprotein gB, gC, gD, or gE. In some aspects, the antigen binding polypeptide or antigen binding polypeptide complex (e.g., antibodies or antigen binding fragments thereof) specifically binds to a viral peptide, protein, polypeptide, or a fragment of Chlamydia MOMP. In some aspects, the antigen binding polypeptide or antigen binding polypeptide complex (e.g., antibodies or antigen binding fragments thereof) specifically binds to a viral peptide, protein, polypeptide, or a fragment of a PorB antigen. In some aspects, the antigen binding polypeptide or antigen binding polypeptide complex (e.g., antibodies or antigen binding fragments thereof) specifically binds to a viral peptide, protein, polypeptide, or a fragment of core protein, matrix protein or other protein of Dengue virus. In some aspects, the antigen binding polypeptide or antigen binding polypeptide complex (e.g., antibodies or antigen binding fragments thereof) specifically binds to a viral peptide, protein, polypeptide, or a fragment of measles virus hemagglutinin. In some aspects, the antigen binding polypeptide or antigen binding polypeptide complex (e.g., antibodies or antigen binding fragments thereof) specifically binds to a viral peptide, protein, polypeptide, or a fragment of simplex virus type 2 glycoprotein gB. In some aspects, the antigen binding polypeptide or antigen binding polypeptide complex (e.g., antibodies or antigen binding fragments thereof) specifically binds to a viral peptide, protein, polypeptide, or a fragment of poliovirus 1 VP1. In some aspects, the antigen binding polypeptide or antigen binding polypeptide complex (e.g., antibodies or antigen binding fragments thereof) specifically binds to a viral peptide, protein, polypeptide, or a fragment of an envelope glycoprotein of HIV 1. In some aspects, the antigen binding polypeptide or antigen binding polypeptide complex (e.g., antibodies or antigen binding fragments thereof) specifically binds to a viral peptide, protein, polypeptide, or a fragment of hepatitis B surface antigen. In some aspects, the antigen binding polypeptide or antigen binding polypeptide complex (e.g., antibodies or antigen binding fragments thereof) specifically binds to a viral peptide, protein, polypeptide, or a fragment of diptheria toxin. In some aspects, the antigen binding polypeptide or antigen binding polypeptide complex (e.g., antibodies or antigen binding fragments thereof) specifically binds to a viral peptide, protein, polypeptide, or a fragment of Streptococcus 24M epitope. In some aspects, the antigen binding polypeptide or antigen binding polypeptide complex (e.g., antibodies or antigen binding fragments thereof) specifically binds to a viral peptide, protein, polypeptide, or a fragment of gonococcal pilin. In some aspects, the antigen binding polypeptide or antigen binding polypeptide complex (e.g., antibodies or antigen binding fragments thereof) specifically binds to a viral peptide, protein, polypeptide, or a fragment of pseudorabies virus g50 (gpD). In some aspects, the antigen binding polypeptide or antigen binding polypeptide complex (e.g., antibodies or antigen binding fragments thereof) specifically binds to a viral peptide, protein, polypeptide, or a fragment of pseudorabies virus II (gpB). In some aspects, the antigen binding polypeptide or antigen binding polypeptide complex (e.g., antibodies or antigen binding fragments thereof) specifically binds to a viral peptide, protein, polypeptide, or a fragment of pseudorabies virus III (gpC). In some aspects, the antigen binding polypeptide or antigen binding polypeptide complex (e.g., antibodies or antigen binding fragments thereof) specifically binds to a viral peptide, protein, polypeptide, or a fragment of pseudorabies virus glycoprotein H. In some aspects, the antigen binding polypeptide or antigen binding polypeptide complex (e.g., antibodies or antigen binding fragments thereof) specifically binds to a viral peptide, protein, polypeptide, or a fragment of pseudorabies virus glycoprotein E. In some aspects, the antigen binding polypeptide or antigen binding polypeptide complex (e.g., antibodies or antigen binding fragments thereof) specifically binds to a viral peptide, protein, polypeptide, or a fragment of transmissible gastroenteritis glycoprotein 195. In some aspects, the antigen binding polypeptide or antigen binding polypeptide complex (e.g., antibodies or antigen binding fragments thereof) specifically binds to a viral peptide, protein, polypeptide, or a fragment of transmissible gastroenteritis matrix protein. In some aspects, the antigen binding polypeptide or antigen binding polypeptide complex (e.g., antibodies or antigen binding fragments thereof) specifically binds to a viral peptide, protein, polypeptide, or a fragment of swine rotavirus glycoprotein 38. In some aspects, the antigen binding polypeptide or antigen binding polypeptide complex (e.g., antibodies or antigen binding fragments thereof) specifically binds to a viral peptide, protein, polypeptide, or a fragment of swine parvovirus capsid protein. In some aspects, the antigen binding polypeptide or antigen binding polypeptide complex (e.g., antibodies or antigen binding fragments thereof) specifically binds to a viral peptide, protein, polypeptide, or a fragment of Serpulinahydodysenteriae protective antigen. In some aspects, the antigen binding polypeptide or antigen binding polypeptide complex (e.g., antibodies or antigen binding fragments thereof) specifically binds to a viral peptide, protein, polypeptide, or a fragment of bovine viral diarrhea glycoprotein 55. In some aspects, the antigen binding polypeptide or antigen binding polypeptide complex (e.g., antibodies or antigen binding fragments thereof) specifically binds to a viral peptide, protein, polypeptide, or a fragment of Newcastle disease virus hemagglutinin-neuraminidase. In some aspects, the antigen binding polypeptide or antigen binding polypeptide complex (e.g., antibodies or antigen binding fragments thereof) specifically binds to a viral peptide, protein, polypeptide, or a fragment of swine flu hemagglutinin. In some aspects, the antigen binding polypeptide or antigen binding polypeptide complex (e.g., antibodies or antigen binding fragments thereof) specifically binds to a viral peptide, protein, polypeptide, or a fragment of swine flu neuraminidase. In some aspects, the antigen binding polypeptide or antigen binding polypeptide complex (e.g., antibodies or antigen binding fragments thereof) specifically binds to a viral peptide, protein, polypeptide, or a fragment of foot and mouth disease virus. In some aspects, the antigen binding polypeptide or antigen binding polypeptide complex (e.g., antibodies or antigen binding fragments thereof) specifically binds to a viral peptide, protein, polypeptide, or a fragment of hog colera virus. In some aspects, the antigen binding polypeptide or antigen binding polypeptide complex (e.g., antibodies or antigen binding fragments thereof) specifically binds to a viral peptide, protein, polypeptide, or a fragment of swine influenza virus. In some aspects, the antigen binding polypeptide or antigen binding polypeptide complex (e.g., antibodies or antigen binding fragments thereof) specifically binds to a viral peptide, protein, polypeptide, or a fragment of African swine fever virus. In some aspects, the antigen binding polypeptide or antigen binding polypeptide complex (e.g., antibodies or antigen binding fragments thereof) specifically binds to a viral peptide, protein, polypeptide, or a fragment of Mycoplasma liyopneutiioniae. In some aspects, the antigen binding polypeptide or antigen binding polypeptide complex (e.g., antibodies or antigen binding fragments thereof) specifically binds to a viral peptide, protein, polypeptide, or a fragment of. In some aspects, the antigen binding polypeptide or antigen binding polypeptide complex (e.g., antibodies or antigen binding fragments thereof) specifically binds to a viral peptide, protein, polypeptide, or a fragment of infectious bovine rhinotracheitis virus. In some aspects, the antigen binding polypeptide or antigen binding polypeptide complex (e.g., antibodies or antigen binding fragments thereof) specifically binds to a viral peptide, protein, polypeptide, or a fragment of infectious bovine rhinotracheitis virus glycoprotein E. In some aspects, the antigen binding polypeptide or antigen binding polypeptide complex (e.g., antibodies or antigen binding fragments thereof) specifically binds to a viral peptide, protein, polypeptide, or a fragment of glycoprotein G. In some aspects, the antigen binding polypeptide or antigen binding polypeptide complex (e.g., antibodies or antigen binding fragments thereof) specifically binds to a viral peptide, protein, polypeptide, or a fragment of infectious laryngotracheitis virus. In some aspects, the antigen binding polypeptide or antigen binding polypeptide complex (e.g., antibodies or antigen binding fragments thereof) specifically binds to a viral peptide, protein, polypeptide, or a fragment of an infectious laryngotracheitis virus glycoprotein G or glycoprotein I. In some aspects, the antigen binding polypeptide or antigen binding polypeptide complex (e.g., antibodies or antigen binding fragments thereof) specifically binds to a viral peptide, protein, polypeptide, or a fragment of a glycoprotein of La Crosse virus. In some aspects, the antigen binding polypeptide or antigen binding polypeptide complex (e.g., antibodies or antigen binding fragments thereof) specifically binds to a viral peptide, protein, polypeptide, or a fragment of neonatal calf diarrhoea virus. In some aspects, the antigen binding polypeptide or antigen binding polypeptide complex (e.g., antibodies or antigen binding fragments thereof) specifically binds to a viral peptide, protein, polypeptide, or a fragment of Venezuelan equine encephalomyelitis virus. In some aspects, the antigen binding polypeptide or antigen binding polypeptide complex (e.g., antibodies or antigen binding fragments thereof) specifically binds to a viral peptide, protein, polypeptide, or a fragment of punta toro virus. In some aspects, the antigen binding polypeptide or antigen binding polypeptide complex (e.g., antibodies or antigen binding fragments thereof) specifically binds to a viral peptide, protein, polypeptide, or a fragment of murine leukemia virus. In some aspects, the antigen binding polypeptide or antigen binding polypeptide complex (e.g., antibodies or antigen binding fragments thereof) specifically binds to a viral peptide, protein, polypeptide, or a fragment of mouse mammary tumor virus. In some aspects, the antigen binding polypeptide or antigen binding polypeptide complex (e.g., antibodies or antigen binding fragments thereof) specifically binds to a viral peptide, protein, polypeptide, or a fragment of hepatitis B virus core protein or hepatitis B virus surface antigen. In some aspects, the antigen binding polypeptide or antigen binding polypeptide complex (e.g., antibodies or antigen binding fragments thereof) specifically binds to a viral peptide, protein, polypeptide, or a fragment of equine influenza virus or equine herpes virus, such as equine influenza virus type A/Alaska 91 neuraminidase, equine influenza virus typeA/Miami 63 neuraminidase, equine influenza virus type A/Kentucky 81 neuraminidase equine herpes virus type 1 glycoprotein B, and equine herpes virus type 1 glycoprotein D. In some aspects, the antigen binding polypeptide or antigen binding polypeptide complex (e.g., antibodies or antigen binding fragments thereof) specifically binds to a viral peptide, protein, polypeptide, or a fragment of bovine respiratory syncytial virus or bovine parainfluenza virus. In some aspects, the antigen binding polypeptide or antigen binding polypeptide complex (e.g., antibodies or antigen binding fragments thereof) specifically binds to a viral peptide, protein, polypeptide, or a fragment of bovine respiratory syncytial virus attachment protein (BRSV G). In some aspects, the antigen binding polypeptide or antigen binding polypeptide complex (e.g., antibodies or antigen binding fragments thereof) specifically binds to a viral peptide, protein, polypeptide, or a fragment of bovine respiratory syncytial virus fusion protein (BRSV F). In some aspects, the antigen binding polypeptide or antigen binding polypeptide complex (e.g., antibodies or antigen binding fragments thereof) specifically binds to a viral peptide, protein, polypeptide, or a fragment of bovine respiratory syncytial virus nucleocapsid protein (BRSVN). In some aspects, the antigen binding polypeptide or antigen binding polypeptide complex (e.g., antibodies or antigen binding fragments thereof) specifically binds to a viral peptide, protein, polypeptide, or a fragment of bovine parainfluenza virus type 3 fusion protein. In some aspects, the antigen binding polypeptide or antigen binding polypeptide complex (e.g., antibodies or antigen binding fragments thereof) specifically binds to a viral peptide, protein, polypeptide, or a fragment of ovine parainfluenza virus type 3 hemagglutinin neuraminidase. In some aspects, the antigen binding polypeptide or antigen binding polypeptide complex (e.g., antibodies or antigen binding fragments thereof) specifically binds to a viral peptide, protein, polypeptide, or a fragment of bovine E viral diarrhoea virus glycoprotein 48 or glycoprotein 53. In some aspects, the antigen binding polypeptide or antigen binding polypeptide complex (e.g., antibodies or antigen binding fragments thereof) specifically binds to a viral peptide, protein, polypeptide, or a fragment of glycoprotein E of Dengue virus. In some aspects, the antigen binding polypeptide or antigen binding polypeptide complex (e.g., antibodies or antigen binding fragments thereof) specifically binds to a viral peptide, protein, polypeptide, or a fragment of glycoprotein ElE2 of human hepatitis C virus. Accordingly, In some aspects, the invention is directed to a method of modulating T cell activation, comprising administering to a subject in need thereof an antigen binding polypeptide, antigen binding polypeptide complex (e.g., antibody or antigen binding fragment thereof), polypeptide, polynucleotide, vector, cell, CAR or pharmaceutical composition described herein, or a combination thereof. In another aspect, the invention is directed to a method of modulating T cell activation, comprising administering to a subject in need thereof a therapeutically effective amount of an antigen binding polypeptide, antigen binding polypeptide complex (e.g., antibody or antigen binding fragment thereof), polypeptide, polynucleotide, vector, cell, CAR or pharmaceutical composition described herein, or a combination thereof.

[0431] In some aspects, the invention is directed to a method of modulating cell proliferation, comprising administering to a subject in need thereof an antigen binding polypeptide, antigen binding polypeptide complex (e.g., antibody or antigen binding fragment thereof), polypeptide, polynucleotide, vector, cell, CAR or pharmaceutical composition described herein, or a combination thereof. In another aspect, the invention is directed to a method of modulating cell proliferation, comprising administering to a subject in need thereof a therapeutically effective amount of an antigen binding polypeptide, antigen binding polypeptide complex (e.g., antibody or antigen binding fragment thereof), polypeptide, polynucleotide, vector, cell, CAR or pharmaceutical composition described herein, or a combination thereof.

[0432] As used herein, the term “modulating” means an increase or decrease in a given property. For example, “modulating T cell activation” means an increase or decrease in T cell activation and “modulating cell proliferation” means an increase or decrease in cell proliferation.

[0433] As used herein, the term “subject” means a human or a non-human mammal, e.g., a dog, a cat, a mouse, a rat, a cow, a sheep, a pig, a goat, a non-human primate or a bird, e.g., a chicken, as well as any other vertebrate or invertebrate. In some aspects, the subject is a human. In some aspects, the subject is a veterinary animal. In some aspects, the subject is a mammal.

[0434] As used herein, the terms “treat” or “treatment” refer to therapeutic or palliative measures. Beneficial or desired clinical results include, but are not limited to, alleviation, in whole or in part, of symptoms associated with a disease or disorder or condition, diminishment of the extent of disease, stabilized (i.e., not worsening) state of disease, delay or slowing of disease progression, amelioration or palliation of the disease state (e.g., one or more symptoms of the disease), and remission (whether partial or total), whether detectable or undetectable. “Treatment” can also mean prolonging survival as compared to expected survival if not receiving treatment.

[0435] As used herein, the terms “prevent” or “preventing” refer to the prevention of the onset, recurrence or spread, in whole or in part, of a disease or condition described herein, or a symptom thereof.

[0436] As used herein, a “therapeutically effective amount” is an amount of an antigen binding polypeptide or antigen binding polypeptide complex (e.g., an antibody or antigen binding fragment thereof) that is sufficient to achieve the desired effect and can vary according to the nature and severity of the disease condition, and the potency of the polypeptide or polypeptide complex. In some aspects, an antigen binding polypeptide or antigen binding polypeptide complex of the invention can be delivered by administering a polynucleotide, vector, CAR or cell that encodes the antigen binding polypeptide or antigen binding polypeptide complex. In some aspects, an antigen binding polypeptide or antigen binding polypeptide complex thereof can be delivered by administering a pharmaceutical composition containing the polypeptide or polypeptide complex. A therapeutic effect is the relief, to some extent, of one or more of the symptoms of the disease, and can include curing a disease. “Curing” means that the symptoms of active disease are eliminated. However, certain long-term or permanent effects of the disease can exist even after a cure is obtained.

[0437] T cell activation can be measured using scientific methods that are well known in the art. For example, T cell activation can be determined by detecting activation of T cells in response to a stimulus by measuring a characteristic response, such as cytokine secretion, or by analyzing cells by the specificity of their T cell receptor. Specific techniques include, but are not limited to, limiting dilutions culture, ELISPOT (enzyme-linked immunospot), intracellular staining, cytokine capture, tetramer staining, and spectratyping and biosensor assays.

[0438] Cell proliferation can be measured using scientific methods that are well known in the art. Such methods include, but are not limited to, metabolic activity assays (e.g., measuring absorbance of formazan dye), cell proliferation marker assays (e.g., Ki-68 antibody), ATP concentration assays (e.g., luciferase luminescence), and DNA synthesis assays (e.g., ³H-thymine or bromodeoxyuridine (BrdU)).

[0439] In some aspects, the invention is directed to a method of neutralizing viral infection, comprising administering to a subject in need thereof an antigen binding polypeptide, antigen binding polypeptide complex (e.g., antibody or antigen binding fragment thereof), polypeptide, polynucleotide, vector, cell, CAR or pharmaceutical composition described herein, or a combination thereof. In another aspect, the invention is directed to a method of neutralizing viral infection, comprising administering to a subject in need thereof a therapeutically effective amount of an antigen binding polypeptide, antigen binding polypeptide complex (e.g., antibody or antigen binding fragment thereof), polypeptide, polynucleotide, vector, cell, CAR or pharmaceutical composition described herein, or a combination thereof. In some aspects, the viral infection is not human immunodeficiency virus (HIV) and/or severe acute respiratory syndrome (SARS).

[0440] In some aspects, the invention is directed to a method of treating or preventing a disease or condition, comprising administering to a subject in need thereof an antigen binding polypeptide, antigen binding polypeptide complex (e.g., antibody or antigen binding fragment thereof), polypeptide, polynucleotide, vector, cell, CAR or pharmaceutical composition described herein, or a combination thereof. In some aspects, the invention is directed to a method of treating or preventing a disease or condition, comprising administering to a subject in need thereof a therapeutically effective amount of an antigen binding polypeptide, antigen binding polypeptide complex (e.g., antibody or antigen binding fragment thereof), polypeptide, polynucleotide, vector, cell, CAR or pharmaceutical composition described herein, or a combination thereof. The present invention further provides an antigen binding polypeptide, antigen binding polypeptide complex (e.g., antibody or antigen binding fragment thereof), polypeptide, polynucleotide, vector, cell, CAR or pharmaceutical composition described herein, or a combination thereof, for use in treating or preventing a disease or condition in a subject. The present invention further provides the use of an antigen binding polypeptide, antigen binding polypeptide complex (e.g., antibody or antigen binding fragment thereof), polypeptide, polynucleotide, vector, cell, CAR or pharmaceutical composition described herein, or a combination thereof in the manufacture of a medicament for the treatment or prevention of a disease or condition in a subject.

[0441] In another aspect, the invention is directed to a method of treating or preventing a virus infection, wherein the virus is influenza virus, respiratory syncytial virus (RSV), Chlamydia, adenovirdiae, mastadeno virus, aviadenovirus, herpesviridae, herpes simplex virus 1, herpes simplex virus 2, herpes simplex virus 5, herpes simplex virus 6, leviviridae, levivirus, enterobacteria phase MS2, allolevirus, poxviridae, chordopoxvirinae, parapoxvirus, avipoxvirus, capripoxvirus, leporiipoxvirus, suipoxvirus, molluscipoxvirus, entomopoxvirinae, papovaviridae, polyomavirus, papillomavirus, paramyxoviridae, paramyxovirus, parainfluenza virus 1, mobillivirus, measles virus, rubulavirus, mumps virus, pneumonovirinae, pneumovirus, me tapneumo virus, avian pneumovirus, human metapneumovirus, picornaviridae, enterovirus, rhinovirus, hepatovirus, human hepatitis A virus, cardiovirus, andaptho virus, reoviridae, orthoreovirus, orbivirus, rotavirus, cypovirus, fijivirus, phytoreovirus, oryzavirus, retroviridae, mammalian type B retroviruses, mammalian type C retroviruses, avian type C retroviruses, type D retrovirus group, BLV-HTLV retroviruses, lentivirus, human immunodeficiency virus 1, human immunodeficiency virus 2, HTLV-I and -II viruses, SARS coronavirus, herpes simplex E virus, Epstein Barr virus, cytomegalovirus, hepatitis virus (HCV, HAV, HBV, HDV, HEV), Toxoplasma gondii virus, Treponema pallidium virus, human T-lymphotrophic virus, encephalitis virus, West Nile virus, Dengue virus, Varicella Zoster Virus, rubeola, mumps, rubella, spumavirus, flaviviridae, hepatitis C virus, hepadnaviridae, hepatitis B virus, togaviridae, alphavirus sindbis virus, rubivirus, rubella virus, rhabdoviridae, vesiculovirus, lyssavirus, ephemerovirus, cytorhabdo virus, necleorhabdo virus, arenaviridae, arenavirus, lymphocytic choriomeningitis virus, Ippy virus, lassa virus, coronaviridae, coronavirus or torovirus. The present invention further provides an antigen binding polypeptide, antigen binding polypeptide complex (e.g., antibody or antigen binding fragment thereof), polypeptide, polynucleotide, vector, cell, CAR or pharmaceutical composition described herein, or a combination thereof, for use in treating or preventing a virus infection in a subject. The present invention further provides the use of an antigen binding polypeptide, antigen binding polypeptide complex (e.g., antibody or antigen binding fragment thereof), polypeptide, polynucleotide, vector, cell, CAR or pharmaceutical composition described herein, or a combination thereof in the manufacture of a medicament for the treatment or prevention of a virus infection in a subject. The virus may be selected from: influenza virus, respiratory syncytial virus (RSV), Chlamydia, adenovirdiae, mastadeno virus, aviadenovirus, herpesviridae, herpes simplex virus 1, herpes simplex virus 2, herpes simplex virus 5, herpes simplex virus 6, leviviridae, levivirus, enterobacteria phase MS2, allolevirus, poxviridae, chordopoxvirinae, parapoxvirus, avipoxvirus, capripoxvirus, leporiipoxvirus, suipoxvirus, molluscipoxvirus, entomopoxvirinae, papovaviridae, polyomavirus, papillomavirus, paramyxoviridae, paramyxovirus, parainfluenza virus 1, mobillivirus, measles virus, rubulavirus, mumps virus, pneumonovirinae, pneumovirus, me tapneumo virus, avian pneumovirus, human metapneumovirus, picomaviridae, enterovirus, rhinovirus, hepatovirus, human hepatitis A virus, cardiovirus, andaptho virus, reoviridae, orthoreovirus, orbivirus, rotavirus, cypovirus, fijivirus, phytoreovirus, oryzavirus, retroviridae, mammalian type B retroviruses, mammalian type C retroviruses, avian type C retroviruses, type D retrovirus group, BLV-HTLV retroviruses, lentivirus, human immunodeficiency virus 1, human immunodeficiency virus 2, HTLV-I and -II viruses, SARS coronavirus, herpes simplex E virus, Epstein Barr virus, cytomegalovirus, hepatitis virus (HCV, HAV, HBV, HDV, HEV), Toxoplasma gondii virus, Treponema pallidium virus, human T-lymphotrophic virus, encephalitis virus, West Nile virus, Dengue virus, Varicella Zoster Virus, rubeola, mumps, rubella, spumavirus, flaviviridae, hepatitis C virus, hepadnaviridae, hepatitis B virus, togaviridae, alphavirus sindbis virus, rubivirus, rubella virus, rhabdoviridae, vesiculovirus, lyssavirus, ephemerovirus, cytorhabdo virus, necleorhabdo virus, arenaviridae, arenavirus, lymphocytic choriomeningitis virus, Ippy virus, lassa virus, coronaviridae, coronavirus and torovirus.

[0442] In some aspects, the invention is directed to a method of treating or preventing a cancer, comprising administering to a subject in need thereof an antigen binding polypeptide, antigen binding polypeptide complex (e.g., antibody or antigen binding fragment thereof), polypeptide, polynucleotide, vector, cell, CAR or pharmaceutical composition described herein, or a combination thereof. In another aspect, the invention is directed to a method of treating or preventing a cancer, comprising administering to a subject in need thereof a therapeutically effective amount of an antigen binding polypeptide, antigen binding polypeptide complex (e.g., antibody or antigen binding fragment thereof), polypeptide, polynucleotide, vector, cell, CAR or pharmaceutical composition described herein, or a combination thereof. The present invention further provides an antigen binding polypeptide, antigen binding polypeptide complex (e.g., antibody or antigen binding fragment thereof), polypeptide, polynucleotide, vector, cell, CAR or pharmaceutical composition described herein, or a combination thereof, for use in treating or preventing a cancer in a subject. The present invention further provides the use of an antigen binding polypeptide, antigen binding polypeptide complex (e.g., antibody or antigen binding fragment thereof), polypeptide, polynucleotide, vector, cell, CAR or pharmaceutical composition described herein, or a combination thereof in the manufacture of a medicament for the treatment or prevention of a cancer in a subject.

[0443] In some aspects, the invention is directed to a method of neutralizing HIV infection, comprising administering to a subject in need thereof an antigen binding polypeptide, antigen binding polypeptide complex (e.g., antibody or antigen binding fragment thereof), polypeptide, polynucleotide, vector, CAR, cell or pharmaceutical composition described herein, or a combination thereof. In some aspects, the invention is directed to a method of neutralizing HIV infection, comprising administering to a subject in need thereof a therapeutically effective amount of an antigen binding polypeptide, antigen binding polypeptide complex (e.g., antibody or antigen binding fragment thereof), polypeptide, polynucleotide, vector, CAR, cell or pharmaceutical composition described herein, or a combination thereof.

[0444] In some aspects, the invention is directed to a method of treating or preventing HIV infection, comprising administering to a subject in need thereof an antigen binding polypeptide, antigen binding polypeptide complex (e.g., antibody or antigen binding fragment thereof), polypeptide, polynucleotide, vector, CAR, cell or pharmaceutical composition described herein, or a combination thereof. In some aspects, the invention is directed to a method of treating or preventing HIV infection, comprising administering to a subject in need thereof a therapeutically effective amount of an antigen binding polypeptide, antigen binding polypeptide complex (e.g., antibody or antigen binding fragment thereof), polypeptide, polynucleotide, vector, CAR, cell or pharmaceutical composition described herein, or a combination thereof. The present invention further provides an antigen binding polypeptide, antigen binding polypeptide complex (e.g., antibody or antigen binding fragment thereof), polypeptide, polynucleotide, vector, cell, CAR or pharmaceutical composition described herein, or a combination thereof, for use in treating or preventing HIV infection in a subject. The present invention further provides the use of an antigen binding polypeptide, antigen binding polypeptide complex (e.g., antibody or antigen binding fragment thereof), polypeptide, polynucleotide, vector, cell, CAR or pharmaceutical composition described herein, or a combination thereof in the manufacture of a medicament for the treatment or prevention of HIV infection in a subject.

[0445] In some aspects, the invention is directed to a method of treating or preventing acquired immunodeficiency syndrome (AIDS), comprising administering to a subject in need thereof an antigen binding polypeptide, antigen binding polypeptide complex (e.g., antibody or antigen binding fragment thereof), polypeptide, polynucleotide, vector, CAR, cell or pharmaceutical composition described herein, or a combination thereof. In some aspects, the invention is directed to a method of treating or preventing AIDS, comprising administering to a subject in need thereof a therapeutically effective amount of an antigen binding polypeptide, antigen binding polypeptide complex (e.g., antibody or antigen binding fragment thereof), polypeptide, polynucleotide, vector, CAR, cell or pharmaceutical composition described herein, or a combination thereof. The present invention further provides an antigen binding polypeptide, antigen binding polypeptide complex (e.g., antibody or antigen binding fragment thereof), polypeptide, polynucleotide, vector, cell, CAR or pharmaceutical composition described herein, or a combination thereof, for use in treating or preventing AIDS in a subject. The present invention further provides the use of an antigen binding polypeptide, antigen binding polypeptide complex (e.g., antibody or antigen binding fragment thereof), polypeptide, polynucleotide, vector, cell, CAR or pharmaceutical composition described herein, or a combination thereof in the manufacture of a medicament for the treatment or prevention of AIDS in a subject.

[0446] AIDS-related complex (ARC) is prodromal phase of HIV infection that presents certain symptoms that include, but are not limited to, low grade fever, unexplained weight loss, diarrhea, HIV-related opportunistic infections and generalized lymphadenopathy. In some aspects, the invention is directed to a method of treating or preventing ARC, comprising administering to a subject in need thereof an antigen binding polypeptide, antigen binding polypeptide complex (e.g., antibody or antigen binding fragment thereof), polypeptide, polynucleotide, vector, CAR, cell or pharmaceutical composition described herein, or a combination thereof. In some aspects, the invention is directed to a method of treating or preventing ARC, comprising administering to a subject in need thereof a therapeutically effective amount of an antigen binding polypeptide, antigen binding polypeptide complex (e.g., antibody or antigen binding fragment thereof), polypeptide, polynucleotide, vector, CAR, cell or pharmaceutical composition described herein, or a combination thereof. The present invention further provides an antigen binding polypeptide, antigen binding polypeptide complex (e.g., antibody or antigen binding fragment thereof), polypeptide, polynucleotide, vector, cell, CAR or pharmaceutical composition described herein, or a combination thereof, for use in treating or preventing ARC in a subject. The present invention further provides the use of an antigen binding polypeptide, antigen binding polypeptide complex (e.g., antibody or antigen binding fragment thereof), polypeptide, polynucleotide, vector, cell, CAR or pharmaceutical composition described herein, or a combination thereof in the manufacture of a medicament for the treatment or prevention of ARC in a subject.

[0447] HIV-related opportunistic infections are illnesses that occur more frequently and/or more severely in subjects infected with HIV, due to their compromised immune systems. Examples of HIV-related opportunistic infections include, but are not limited to, candidiasis, invasive cervical cancer, coccidioidomycosis, cryptococcosis, cryptosporidiosis (Crypto), cystoisosporiasis, cytomegalovirus (CMV) infection, encephalopathy, herpes simplex virus (HSV) infection, histoplasmosis, Kaposi's sarcoma (KS), lymphoma, tuberculosis, Mycobacterium avium complex (MAC), Pneumocystis pneumonia (PCP), pneumonia, progressive multifocal leukoencephalopathy, Salmonella septicemia, toxoplasmosis, or wasting syndrome.

[0448] In some aspects, the invention is directed to a method of treating or preventing an HIV-related opportunistic infection, comprising administering to a subject in need thereof an antigen binding polypeptide, antigen binding polypeptide complex (e.g., antibody or antigen binding fragment thereof), polypeptide, polynucleotide, vector, CAR, cell or pharmaceutical composition described herein, or a combination thereof. In some aspects, the invention is directed to a method of treating or preventing an HIV-related opportunistic infection, comprising administering to a subject in need thereof a therapeutically effective amount of an antigen binding polypeptide, antigen binding polypeptide complex (e.g., antibody or antigen binding fragment thereof), polypeptide, polynucleotide, vector, CAR, cell or pharmaceutical composition described herein, or a combination thereof. The present invention further provides an antigen binding polypeptide, antigen binding polypeptide complex (e.g., antibody or antigen binding fragment thereof), polypeptide, polynucleotide, vector, cell, CAR or pharmaceutical composition described herein, or a combination thereof, for use in treating or preventing an HIV-related opportunistic infection in a subject. The present invention further provides the use of an antigen binding polypeptide, antigen binding polypeptide complex (e.g., antibody or antigen binding fragment thereof), polypeptide, polynucleotide, vector, cell, CAR or pharmaceutical composition described herein, or a combination thereof in the manufacture of a medicament for the treatment or prevention of an HIV-related opportunistic infection in a subject.

[0449] In some aspects of any of the methods and uses disclosed herein, the HIV is HIV-1 or HIV-2.

### Clauses Relating to Aspects of the Invention

[0450] 1. An antigen binding polypeptide having a structure represented by:
[0451] VL1-VL2-VH2-VH1;
[0452] VH1-VH2-VL2-VL1;
[0453] VL1-L1-VL2-L2-VH2-L3-VH1; or
[0454] VH1-L1-VH2-L2-VL2-L3-VL1;
[0455] wherein:
[0456] VL1 is a first immunoglobulin light chain variable region;
[0457] VL2 is a second immunoglobulin light chain variable region;
[0458] VH1 is a first immunoglobulin heavy chain variable region;
[0459] VH2 is a second immunoglobulin heavy chain variable region; and
[0460] L1, L2 and L3 are amino acid linkers.
[0461] 2. The C antigen binding polypeptide of clause 1, wherein the polypeptide has a structure represented by:
[0462] VL1-VL2-VH2-VH1-Fc;
[0463] VH1-VH2-VL2-VL1-Fc;
[0464] VL1-L1-VL2-L2-VH2-L3-VH1-Fc;
[0465] VH1-L1-VH2-L2-VL2-L3-VL1-Fc;
[0466] VL1-L1-VL2-L2-VH2-L3-VH1-L4-Fc; or
[0467] VH1-L1-VH2-L2-VL2-L3-VL1-L4-Fc;
[0468] wherein:
[0469] VL1 is a first immunoglobulin light chain variable region;
[0470] VL2 is a second immunoglobulin light chain variable region;
[0471] VH1 is a first immunoglobulin heavy chain variable region;
[0472] VH2 is a second immunoglobulin heavy chain variable region;
[0473] Fc is a region comprising an immunoglobulin heavy chain constant region 2 (CH2), an immunoglobulin heavy chain constant region 3 (CH3), and optionally, an immunoglobulin hinge; and
[0474] L1, L2, L3 and L4 are amino acid linkers.
[0475] 3. The C antigen binding polypeptide of clause 1, wherein the polypeptide has a structure represented by:
[0476] VL1-VL2-VH2-VH1-CH1-CL;
[0477] VH1-VH2-VL2-VL1-CH1-CL;
[0478] VL1-VL2-VH2-VH1-CL-CH1;
[0479] VH1-VH2-VL2-VL1-CL-CH1;
[0480] VL1-L1-VL2-L2-VH2-L3-VH1-L4-CH1-CL;
[0481] VH1-L1-VH2-L2-VL2-L3-VL1-L4-CH1-CL;
[0482] VL1-L1-VL2-L2-VH2-L3-VH1-L4-CL-CH1;
[0483] VH1-L1-VH2-L2-VL2-L3-VL1-L4-CL-CH1;
[0484] VL1-L1-VL2-L2-VH2-L3-VH1-L4-CH1-L5-CL;
[0485] VH1-L1-VH2-L2-VL2-L3-VL1-L4-CH1-L5-CL;
[0486] VL1-L1-VL2-L2-VH2-L3-VH1-L4-CL-L5-CH1; or
[0487] VH1-L1-VH2-L2-VL2-L3-VL1-L4-CL-L5-CH1;
[0488] wherein:
[0489] VL1 is a first immunoglobulin light chain variable region;
[0490] VL2 is a second immunoglobulin light chain variable region;
[0491] VH1 is a first immunoglobulin heavy chain variable region;
[0492] VH2 is a second immunoglobulin heavy chain variable region;
[0493] CH1 is an immunoglobulin heavy chain constant region 1;
[0494] CL is an immunoglobulin light chain constant region; and
[0495] L1, L2, L3, L4 and L5 are amino acid linkers.
[0496] 4. The antigen binding polypeptide of clause 1, wherein the polypeptide has a structure represented by:
[0497] VL1-VL2-VH2-VH1-CH1-CL-Fc;
[0498] VH1-VH2-VL2-VL1-CH1-CL-Fc;
[0499] VL1-VL2-VH2-VH1-CL-CH1-Fc;
[0500] VH1-VH2-VL2-VL1-CL-CH1-Fc;
[0501] VL1-L1-VL2-L2-VH2-L3-VH1-L4-CH1-L5-CL-Fc;
[0502] VH1-L1-VH2-L2-VL2-L3-VL1-L4-CH1-L5-CL-Fc;
[0503] VL1-L1-VL2-L2-VH2-L3-VH1-L4-CL-L5-CH1-Fc;
[0504] VH1-L1-VH2-L2-VL2-L3-VL1-L4-CL-L5-CH1-Fc;
[0505] VL1-L1-VL2-L2-VH2-L3-VH1-L4-CH1-L5-CL-L6-Fc;
[0506] VH1-L1-VH2-L2-VL2-L3-VL1-L4-CH1-L5-CL-L6-Fc;
[0507] VL1-L1-VL2-L2-VH2-L3-VH1-L4-CL-L5-CH1-L6-Fc; or
[0508] VH1-L1-VH2-L2-VL2-L3-VL1-L4-CL-L5-CH1-L6-Fc;
[0509] wherein:
[0510] VL1 is a first immunoglobulin light chain variable region;
[0511] VL2 is a second immunoglobulin light chain variable region;
[0512] VH1 is a first immunoglobulin heavy chain variable region;
[0513] VH2 is a second immunoglobulin heavy chain variable region;
[0514] CH1 is an immunoglobulin heavy chain constant region 1;
[0515] CL is an immunoglobulin light chain constant region; and
[0516] Fc is a region comprising an immunoglobulin heavy chain constant region 2 (CH2), an immunoglobulin heavy chain constant region 3 (CH3), and optionally, an immunoglobulin hinge; and
[0517] L1, L2, L3, L4, L5 and L6 are amino acid linkers.
[0518] 5. The antigen binding polypeptide of clause 1, wherein the polypeptide has a structure represented by:
[0519] VL1-VL2-VH2-VH1-Fc-Fc;
[0520] VH1-VH2-VL2-VL1-Fc-Fc;
[0521] VL1-L1-VL2-L2-VH2-L3-VH1-Fc-Fc;
[0522] VH1-L1-VH2-L2-VL2-L3-VL1-Fc-Fc;
[0523] VL1-L1-VL2-L2-VH2-L3-VH1-L4-Fc-Fc;
[0524] VH1-L1-VH2-L2-VL2-L3-VL1-L4-Fc-Fc;
[0525] VL1-L1-VL2-L2-VH2-L3-VH1-L4-Fc-L5-Fc; or
[0526] VH1-L1-VH2-L2-VL2-L3-VL1-L4-Fc-L5-Fc;
[0527] wherein:
[0528] VL1 is a first immunoglobulin light chain variable region;
[0529] VL2 is a second immunoglobulin light chain variable region;
[0530] VH1 is a first immunoglobulin heavy chain variable region;
[0531] VH2 is a second immunoglobulin heavy chain variable region;
[0532] Fc is a region comprising an immunoglobulin heavy chain constant region 2 (CH2), an immunoglobulin heavy chain constant region 3 (CH3), and optionally, an immunoglobulin hinge; and
[0533] L1, L2, L3, L4 and L5 are amino acid linkers.
[0534] 6. The antigen binding polypeptide of clause 1, wherein the polypeptide has a structure represented by:
[0535] VL1-VL2-VH2-VH1-CH3;
[0536] VH1-VH2-VL2-VL1-CH3;
[0537] VL1-L1-VL2-L2-VH2-L3-VH1-CH3;
[0538] VH1-L1-VH2-L2-VL2-L3-VL1-CH3;
[0539] VL1-L1-VL2-L2-VH2-L3-VH1-L4-CH3;
[0540] VH1-L1-VH2-L2-VL2-L3-VL1-L4-CH3;
[0541] VL1-VL2-VH2-VH1-CH3-CH3;
[0542] VH1-VH2-VL2-VL1-CH3-CH3;
[0543] VL1-L1-VL2-L2-VH2-L3-VH1-CH3-CH3;
[0544] VH1-L1-VH2-L2-VL2-L3-VL1-CH3-CH3;
[0545] VL1-L1-VL2-L2-VH2-L3-VH1-L4-CH3-CH3;
[0546] VH1-L1-VH2-L2-VL2-L3-VL1-L4-CH3-CH3;
[0547] VL1-L1-VL2-L2-VH2-L3-VH1-L4-CH3-L5-CH3; or
[0548] VH1-L1-VH2-L2-VL2-L3-VL1-L4-CH3-L5-CH3;
[0549] wherein:
[0550] VL1 is a first immunoglobulin light chain variable region;
[0551] VL2 is a second immunoglobulin light chain variable region;
[0552] VH1 is a first immunoglobulin heavy chain variable region;
[0553] VH2 is a second immunoglobulin heavy chain variable region;
[0554] CH3 is an immunoglobulin heavy chain constant region 3; and
[0555] L1, L2, L3, L4 and L5 are amino acid linkers.
[0556] 7. The antigen binding polypeptide of clause 1, wherein the polypeptide has at least 90% identity to any one of SEQ ID NOs:32-43, 62-79, 130-138, 633, 635, 637, 639, 641, 643, 645, 647, 649, 651, 653, 655, 657, 659, 661, 663, 665, 667, 669, 671, 673, 675, 677, and 679, optionally wherein the polypeptide has at least 95% or 100% identity to any one of SEQ ID NOs:32-43, 62-79, 130-138, 633, 635, 637, 639, 641, 643, 645, 647, 649, 651, 653, 655, 657, 659, 661, 663, 665, 667, 669, 671, 673, 675, 677, and 679; or wherein the polypeptide has at least 90% identity to the amino acid sequence of SEQ ID NOs:32 or 33 that does not contain the eight histidine residues at the C-terminus, optionally wherein the polypeptide has at least 95% or 100% identity to the amino acid sequence of SEQ ID Nos:32 or 33 that does not contain the eight histidine residues at the C-terminus.
[0557] 8. The antigen binding polypeptide of clause 7, wherein the polypeptide is encoded by a polynucleotide having at least 90% identity to any one of SEQ ID NOs:44-55, 80-97, 139-147, 634, 636, 638, 640, 642, 644, 646, 648, 650, 652, 654, 656, 658, 660, 662, 664, 666, 668, 670, 672, 674, 676, 678, and 680, optionally wherein the polypeptide is encoded by a polynucleotide having at least 95% or 100% identity to any one of SEQ ID NOs:44-55, 80-97, 139-147, 634, 636, 638, 640, 642, 644, 646, 648, 650, 652, 654, 656, 658, 660, 662, 664, 666, 668, 670, 672, 674, 676, 678, and 680.
[0558] 9. The antigen binding polypeptide of clause 1, wherein the polypeptide has at least 90% identity to any one of SEQ ID NOs:198-209, 346 and 348, optionally wherein the polypeptide has at least 95% or 100% identity to any one of SEQ ID NOs:198-209, 346 and 348.
[0559] 10. The antigen binding polypeptide of clause 9, wherein the polypeptide is encoded by a polynucleotide having at least 90% identity to any one of SEQ ID Nos:347 and 349-361, optionally wherein the polypeptide is encoded by a polynucleotide having at least 95% or 100% identity to any one of SEQ ID Nos:347 and 349-361.
[0560] 11. An antigen binding polypeptide complex comprising:
[0561] (i) a first polypeptide and a second polypeptide, wherein the first polypeptide has a structure represented by:
[0562] VL1-VL2-VH2-VH1;
[0563] VH1-VH2-VL2-VL1;
[0564] VL1-L1-VL2-L2-VH2-L3-VH1; or
[0565] VH1-L1-VH2-L2-VL2-L3-VL1; and
[0566] the second polypeptide has a structure represented by:
[0567] VL1-VL2-VH2-VH1;
[0568] VH1-VH2-VL2-VL1;
[0569] VL1-L1-VL2-L2-VH2-L3-VH1;
[0570] VH1-L1-VH2-L2-VL2-L3-VL1;
[0571] VL3-VL4-VH4-VH3;
[0572] VH3-VH4-VL4-VL3;
[0573] VL3-L4-VL4-L5-VH4-L6-VH3; or
[0574] VH3-L4-VH4-L5-VL4-L6-VL3;
[0575] (ii) a first polypeptide and a second polypeptide, wherein the first polypeptide has a structure represented by:
[0576] VL1-VL2-VH2-VH1-Fc;
[0577] VH1-VH2-VL2-VL1-Fc;
[0578] VL1-L1-VL2-L2-VH2-L3-VH1-Fc;
[0579] VH1-L1-VH2-L2-VL2-L3-VL1-Fc;
[0580] VL1-L1-VL2-L2-VH2-L3-VH1-L4-Fc;
[0581] VH1-L1-VH2-L2-VL2-L3-VL1-L4-Fc; or
[0582] and
[0583] the second polypeptide has a structure represented by:
[0584] Fc;
[0585] VL1-VL2-VH2-VH1-Fc;
[0586] VH1-VH2-VL2-VL1-Fc;
[0587] VL1-L1-VL2-L2-VH2-L3-VH1-Fc;
[0588] VH1-L1-VH2-L2-VL2-L3-VL1-Fc
[0589] VL1-L1-VL2-L2-VH2-L3-VH1-L4-Fc;
[0590] VH1-L1-VH2-L2-VL2-L3-VL1-L4-Fc;
[0591] VL3-VL4-VH4-VH3-Fc;
[0592] VH3-VH4-VL4-VL3-Fc;
[0593] VL3-L5-VL4-L6-VH4-L7-VH3-Fc;
[0594] VH3-L5-VH4-L6-VL4-L7-VL3-Fc;
[0595] VL3-L5-VL4-L6-VH4-L7-VH3-L8-Fc; or
[0596] VH3-L5-VH4-L6-VL4-L7-VL3-L8-Fc;
[0597] or
[0598] (iii) a polypeptide as defined in clause 5 or clause 6;
[0599] wherein:
[0600] VL1 is a first immunoglobulin light chain variable region;
[0601] VL2 is a second immunoglobulin light chain variable region;
[0602] VL3 is a third immunoglobulin light chain variable region;
[0603] VL4 is a fourth immunoglobulin light chain variable region;
[0604] VH1 is a first immunoglobulin heavy chain variable region;
[0605] VH2 is a second immunoglobulin heavy chain variable region;
[0606] VH3 is a third immunoglobulin heavy chain variable region;
[0607] VH4 is a fourth immunoglobulin heavy chain variable region;
[0608] Fc is a region comprising an immunoglobulin heavy chain constant region 2 (CH2), an immunoglobulin heavy chain constant region 3 (CH3), and optionally, an immunoglobulin hinge; and
[0609] L1, L2, L3, L4, L5, L6, L7 and L8 are amino acid linkers.
[0610] 12. The antigen binding polypeptide complex of clause 11(i), wherein the first polypeptide has a structure represented by:
[0611] VL1-VL2-VH2-VH1;
[0612] VH1-VH2-VL2-VL1;
[0613] VL1-L1-VL2-L2-VH2-L3-VH1; or
[0614] VH1-L1-VH2-L2-VL2-L3-VL1; and
[0615] the second polypeptide has a structure represented by:
[0616] VL1-VL2-VH2-VH1;
[0617] VH1-VH2-VL2-VL1;
[0618] VL1-L1-VL2-L2-VH2-L3-VH1;
[0619] VH1-L1-VH2-L2-VL2-L3-VL1;
[0620] wherein:
[0621] VL1 is a first immunoglobulin light chain variable region;
[0622] VL2 is a second immunoglobulin light chain variable region;
[0623] VH1 is a first immunoglobulin heavy chain variable region;
[0624] VH2 is a second immunoglobulin heavy chain variable region; and
[0625] L1, L2 and L3 are amino acid linkers.
[0626] 13. The antigen binding polypeptide complex of clause 11(i),
[0627] wherein the first polypeptide has a structure represented by:
[0628] VL1-VL2-VH2-VH1;
[0629] VH1-VH2-VL2-VL1;
[0630] VL1-L1-VL2-L2-VH2-L3-VH1; or
[0631] VH1-L1-VH2-L2-VL2-L3-VL1; and
[0632] wherein the second polypeptide has a structure represented by:
[0633] VL3-VL4-VH4-VH3;
[0634] VH3-VH4-VL4-VL3;
[0635] VL3-L4-VL4-L5-VH4-L6-VH3; or
[0636] VH3-L4-VH4-L5-VL4-L6-VL3;
[0637] wherein:
[0638] VL1 is a first immunoglobulin light chain variable region;
[0639] VL2 is a second immunoglobulin light chain variable region;
[0640] VL3 is a third immunoglobulin light chain variable region;
[0641] VL4 is a fourth immunoglobulin light chain variable region;
[0642] VH1 is a first immunoglobulin heavy chain variable region;
[0643] VH2 is a second immunoglobulin heavy chain variable region;
[0644] VH3 is a third immunoglobulin heavy chain variable region;
[0645] VH4 is a fourth immunoglobulin heavy chain variable region; and
[0646] L1, L2, L3, L4, L5 and L6 are amino acid linkers.
[0647] 14. The antigen binding polypeptide complex of clause 11(ii), wherein the first polypeptide has a structure represented by:
[0648] VL1-VL2-VH2-VH1-Fc;
[0649] VH1-VH2-VL2-VL1-Fc;
[0650] VL1-L1-VL2-L2-VH2-L3-VH1-Fc;
[0651] VH1-L1-VH2-L2-VL2-L3-VL1-Fc;
[0652] VL1-L1-VL2-L2-VH2-L3-VH1-L4-Fc; or
[0653] VH1-L1-VH2-L2-VL2-L3-VL1-L4-Fc;
[0654] and
[0655] wherein the second polypeptide has a structure represented by:
[0656] Fc;
[0657] VL1-VL2-VH2-VH1-Fc;
[0658] VH1-VH2-VL2-VL1-Fc;
[0659] VL1-L1-VL2-L2-VH2-L3-VH1-Fc;
[0660] VH1-L1-VH2-L2-VL2-L3-VL1-Fc
[0661] VL1-L1-VL2-L2-VH2-L3-VH1-L4-Fc;
[0662] VH1-L1-VH2-L2-VL2-L3-VL1-L4-Fc;
[0663] wherein:
[0664] VL1 is a first immunoglobulin light chain variable region;
[0665] VL2 is a second immunoglobulin light chain variable region;
[0666] VH1 is a first immunoglobulin heavy chain variable region;
[0667] VH2 is a second immunoglobulin heavy chain variable region;
[0668] Fc is a region comprising an immunoglobulin heavy chain constant region 2 (CH2), an immunoglobulin heavy chain constant region 3 (CH3), and optionally, an immunoglobulin hinge; and
[0669] L1, L2, L3 and L4 are amino acid linkers.
[0670] 15. The antigen binding polypeptide complex of clause 11(ii),
[0671] wherein the first polypeptide has a structure represented by:
[0672] VL1-VL2-VH2-VH1-Fc;
[0673] VH1-VH2-VL2-VL1-Fc;
[0674] VL1-L1-VL2-L2-VH2-L3-VH1-Fc;
[0675] VH1-L1-VH2-L2-VL2-L3-VL1-Fc;
[0676] VL1-L1-VL2-L2-VH2-L3-VH1-L4-Fc; or
[0677] VH1-L1-VH2-L2-VL2-L3-VL1-L4-Fc; and
[0678] wherein the second polypeptide has a structure represented by:
[0679] VL3-VL4-VH4-VH3-Fc;
[0680] VH3-VH4-VL4-VL3-Fc;
[0681] VL3-L5-VL4-L6-VH4-L7-VH3-Fc;
[0682] VH3-L5-VH4-L6-VL4-L7-VL3-Fc;
[0683] VL3-L5-VL4-L6-VH4-L7-VH3-L8-Fc; or
[0684] VH3-L5-VH4-L6-VL4-L7-VL3-L8-Fc;
[0685] wherein:
[0686] VL1 is a first immunoglobulin light chain variable region;
[0687] VL2 is a second immunoglobulin light chain variable region;
[0688] VL3 is a third immunoglobulin light chain variable region;
[0689] VL4 is a fourth immunoglobulin light chain variable region;
[0690] VH1 is a first immunoglobulin heavy chain variable region;
[0691] VH2 is a second immunoglobulin heavy chain variable region;
[0692] VH3 is a third immunoglobulin heavy chain variable region;
[0693] VH4 is a fourth immunoglobulin heavy chain variable region;
[0694] Fc is a region comprising an immunoglobulin heavy chain constant region 2 (CH2), an immunoglobulin heavy chain constant region 3 (CH3), and optionally, an immunoglobulin hinge; and
[0695] L1, L2, L3, L4, L5, L6, L7 and L8 are amino acid linkers.
[0696] 16. The antigen binding polypeptide complex of clause 11(i), wherein the first polypeptide has a structure represented by:
[0697] VL1-VL2-VH2-VH1-CH1;
[0698] VH1-VH2-VL2-VL1-CH1;
[0699] VL1-VL2-VH2-VH1-CL;
[0700] VH1-VH2-VL2-VL1-CL;
[0701] VL1-VL2-VH2-VH1-CH1-CL;
[0702] VH1-VH2-VL2-VL1-CH1-CL;
[0703] VL1-VL2-VH2-VH1-CL-CH1;
[0704] VH1-VH2-VL2-VL1-CL-CH1;
[0705] VL1-L1-VL2-L2-VH2-L3-VH1-L4-CH1;
[0706] VH1-L1-VH2-L2-VL2-L3-VL1-L4-CH1;
[0707] VL1-L1-VL2-L2-VH2-L3-VH1-L4-CL;
[0708] VH1-L1-VH2-L2-VL2-L3-VL1-L4-CL;
[0709] VL1-L1-VL2-L2-VH2-L3-VH1-L4-CH1-L5-CL;
[0710] VH1-L1-VH2-L2-VL2-L3-VL1-L4-CH1-L5-CL;
[0711] VL1-L1-VL2-L2-VH2-L3-VH1-L4-CL-L5-CH1; or
[0712] VH1-L1-VH2-L2-VL2-L3-VL1-L4-CL-L5-CH1; and
[0713] wherein the second polypeptide has a structure represented by:
[0714] VL1-VL2-VH2-VH1-CH1;
[0715] VL1-VL2-VH2-VH1-CH1;
[0716] VH1-VH2-VL2-VL1-CH1;
[0717] VL1-VL2-VH2-VH1-CL;
[0718] VH1-VH2-VL2-VL1-CL;
[0719] VL1-VL2-VH2-VH1-CH1-CL;
[0720] VH1-VH2-VL2-VL1-CH1-CL;
[0721] VL1-VL2-VH2-VH1-CL-CH1;
[0722] VH1-VH2-VL2-VL1-CL-CH1;
[0723] VL1-L1-VL2-L2-VH2-L3-VH1-L4-CH1;
[0724] VH1-L1-VH2-L2-VL2-L3-VL1-L4-CH1;
[0725] VL1-L1-VL2-L2-VH2-L3-VH1-L4-CL;
[0726] VH1-L1-VH2-L2-VL2-L3-VL1-L4-CL;
[0727] VL1-L1-VL2-L2-VH2-L3-VH1-L4-CH1-L5-CL;
[0728] VH1-L1-VH2-L2-VL2-L3-VL1-L4-CH1-L5-CL;
[0729] VL1-L1-VL2-L2-VH2-L3-VH1-L4-CL-L5-CH1; or
[0730] VH1-L1-VH2-L2-VL2-L3-VL1-L4-CL-L5-CH1;
[0731] wherein:
[0732] VL1 is a first immunoglobulin light chain variable region;
[0733] VL2 is a second immunoglobulin light chain variable region;
[0734] VH1 is a first immunoglobulin heavy chain variable region;
[0735] VH2 is a second immunoglobulin heavy chain variable region;
[0736] CH1 is an immunoglobulin heavy chain constant region 1;
[0737] CL is an immunoglobulin light chain constant region; and
[0738] L1, L2, L3, L4 and L5 are amino acid linkers.
[0739] 17. The antigen binding polypeptide complex of clause 11(i),
[0740] wherein the first polypeptide has a structure represented by:
[0741] VL1-VL2-VH2-VH1-CH1;
[0742] VH1-VH2-VL2-VL1-CH1;
[0743] VL1-VL2-VH2-VH1-CL;
[0744] VH1-VH2-VL2-VL1-CL;
[0745] VL1-VL2-VH2-VH1-CH1-CL;
[0746] VH1-VH2-VL2-VL1-CH1-CL;
[0747] VL1-VL2-VH2-VH1-CL-CH1;
[0748] VH1-VH2-VL2-VL1-CL-CH1;
[0749] VL1-L1-VL2-L2-VH2-L3-VH1-L4-CH1;
[0750] VH1-L1-VH2-L2-VL2-L3-VL1-L4-CH1;
[0751] VL1-L1-VL2-L2-VH2-L3-VH1-L4-CL;
[0752] VH1-L1-VH2-L2-VL2-L3-VL1-L4-CL;
[0753] VL1-L1-VL2-L2-VH2-L3-VH1-L4-CH1-L5-CL;
[0754] VH1-L1-VH2-L2-VL2-L3-VL1-L4-CH1-L5-CL;
[0755] VL1-L1-VL2-L2-VH2-L3-VH1-L4-CL-L5-CH1; or
[0756] VH1-L1-VH2-L2-VL2-L3-VL1-L4-CL-L5-CH1; and
[0757] wherein the second polypeptide has a structure represented by:
[0758] VL3-VL4-VH4-VH3-CH1;
[0759] VH3-VH4-VL4-VL3-CH1;
[0760] VL3-VL4-VH4-VH3-CL;
[0761] VH3-VH4-VL4-VL3-CL;
[0762] VL3-VL4-VH4-VH3-CH1-CL;
[0763] VH3-VH4-VL4-VL3-CH1-CL;
[0764] VL3-VL4-VH4-VH3-CL-CH1;
[0765] VH3-VH4-VL4-VL3-CL-CH1;
[0766] VL3-L6-VL4-L7-VH4-L8-VH3-L9-CH1;
[0767] VH3-L6-VH4-L7-VL4-L8-VL3-L9-CH1;
[0768] VL3-L6-VL4-L7-VH4-L8-VH3-L9-CL;
[0769] VH3-L6-VH4-L7-VL4-L8-VL3-L9-CL;
[0770] VL3-L6-VL4-L7-VH4-L8-VH3-L9-CH1-L10-CL;
[0771] VH3-L6-VH4-L7-VL4-L8-VL3-L9-CH1-L10-CL;
[0772] VL3-L6-VL4-L7-VH4-L8-VH3-L9-CL-L10-CH1; or
[0773] VH3-L6-VH4-L7-VL4-L8-VL3-L9-CL-L10-CH1;
[0774] wherein
[0775] VL1 is a first immunoglobulin light chain variable region;
[0776] VL2 is a second immunoglobulin light chain variable region;
[0777] VL3 is a third immunoglobulin light chain variable region;
[0778] VL4 is a fourth immunoglobulin light chain variable region;
[0779] VH1 is a first immunoglobulin heavy chain variable region;
[0780] VH2 is a second immunoglobulin heavy chain variable region;
[0781] VH3 is a third immunoglobulin heavy chain variable region;
[0782] VH4 is a fourth immunoglobulin heavy chain variable region;
[0783] CH1 is an immunoglobulin heavy chain constant region 1;
[0784] CL is an immunoglobulin light chain constant region; and
[0785] L1, L2, L3, L4, L5, L6, L7, L8, L9 and L10 are amino acid linkers.
[0786] 18. The antigen binding polypeptide complex of clause 11(ii), wherein the first polypeptide has a structure represented by:
   [0787] VL1-VL2-VH2-VH1-CH1-Fc;
   [0788] VH1-VH2-VL2-VL1-CH1-Fc;
   [0789] VL1-VL2-VH2-VH1-CL-Fc;
   [0790] VH1-VH2-VL2-VL1-CL-Fc;
   [0791] VL1-VL2-VH2-VH1-CH1-CL-Fc;
   [0792] VH1-VH2-VL2-VL1-CH1-CL-Fc;
   [0793] VL1-VL2-VH2-VH1-CL-CH1-Fc;
   [0794] VH1-VH2-VL2-VL1-CL-CH1-Fc;
   [0795] VL1-L1-VL2-L2-VH2-L3-VH1-L4-CH1-Fc;
   [0796] VH1-L1-VH2-L2-VL2-L3-VL1-L4-CH1-Fc;
   [0797] VL1-L1-VL2-L2-VH2-L3-VH1-L4-CL-Fc;
   [0798] VH1-L1-VH2-L2-VL2-L3-VL1-L4-CL-Fc;
   [0799] VL1-L1-VL2-L2-VH2-L3-VH1-L4-CH1-L5-CL-Fc;
   [0800] VH1-L1-VH2-L2-VL2-L3-VL1-L4-CH1-L5-CL-Fc;
   [0801] VL1-L1-VL2-L2-VH2-L3-VH1-L4-CL-L5-CH1-Fc;
   [0802] VH1-L1-VH2-L2-VL2-L3-VL1-L4-CL-L5-CH1-Fc;
   [0803] VL1-L1-VL2-L2-VH2-L3-VH1-L4-CH1-L5-CL-L6-Fc;
   [0804] VH1-L1-VH2-L2-VL2-L3-VL1-L4-CH1-L5-CL-L6-Fc;
   [0805] VL1-L1-VL2-L2-VH2-L3-VH1-L4-CL-L5-CH1-L6-Fc; or
   [0806] VH1-L1-VH2-L2-VL2-L3-VL1-L4-CL-L5-CH1-L6-Fc; and
   [0807] wherein the second polypeptide has a structure represented by:
   [0808] Fc;
   [0809] VL1-VL2-VH2-VH1-CH1-Fc;
   [0810] VH1-VH2-VL2-VL1-CH1-Fc;
   [0811] VL1-VL2-VH2-VH1-CL-Fc;
   [0812] VH1-VH2-VL2-VL1-CL-Fc;
   [0813] VL1-VL2-VH2-VH1-CH1-CL-Fc;
   [0814] VH1-VH2-VL2-VL1-CH1-CL-Fc;
   [0815] VL1-VL2-VH2-VH1-CL-CH1-Fc;
   [0816] VH1-VH2-VL2-VL1-CL-CH1-Fc;
   [0817] VL1-L1-VL2-L2-VH2-L3-VH1-L4-CH1-Fc;
   [0818] VH1-L1-VH2-L2-VL2-L3-VL1-L4-CH1-Fc;
   [0819] VL1-L1-VL2-L2-VH2-L3-VH1-L4-CL-Fc;
   [0820] VH1-L1-VH2-L2-VL2-L3-VL1-L4-CL-Fc;
   [0821] VL1-L1-VL2-L2-VH2-L3-VH1-L4-CH1-L5-CL-Fc;
   [0822] VH1-L1-VH2-L2-VL2-L3-VL1-L4-CH1-L5-CL-Fc;
   [0823] VL1-L1-VL2-L2-VH2-L3-VH1-L4-CL-L5-CH1-Fc; or
   [0824] VH1-L1-VH2-L2-VL2-L3-VL1-L4-CL-L5-CH1-Fc;
   [0825] wherein:
   [0826] VL1 is a first immunoglobulin light chain variable region;
   [0827] VL2 is a second immunoglobulin light chain variable region;
   [0828] VH1 is a first immunoglobulin heavy chain variable region;
   [0829] VH2 is a second immunoglobulin heavy chain variable region;
   [0830] CH1 is an immunoglobulin heavy chain constant region 1;
   [0831] CL is an immunoglobulin light chain constant region;
[0832] Fc is a region comprising an immunoglobulin heavy chain constant region 2 (CH2), an immunoglobulin heavy chain constant region 3 (CH3), and optionally, an immunoglobulin hinge; and
   [0833] L1, L2, L3, L4, L5 and L6 are amino acid linkers.
[0834] 19. The antigen binding polypeptide complex of clause 11(ii),
[0835] wherein the first polypeptide has a structure represented by:
[0836] VL1-VL2-VH2-VH1-CH1-Fc;
[0837] VH1-VH2-VL2-VL1-CH1-Fc;
[0838] VL1-VL2-VH2-VH1-CL-Fc;
[0839] VH1-VH2-VL2-VL1-CL-Fc;
[0840] VL1-VL2-VH2-VH1-CH1-CL-Fc;
[0841] VH1-VH2-VL2-VL1-CH1-CL-Fc;
[0842] VL1-VL2-VH2-VH1-CL-CH1-Fc;
[0843] VH1-VH2-VL2-VL1-CL-CH1-Fc;
[0844] VL1-L1-VL2-L2-VH2-L3-VH1-L4-CH1-Fc;
[0845] VH1-L1-VH2-L2-VL2-L3-VL1-L4-CH1-Fc;
[0846] VL1-L1-VL2-L2-VH2-L3-VH1-L4-CL-Fc;
[0847] VH1-L1-VH2-L2-VL2-L3-VL1-L4-CL-Fc;
[0848] VL1-L1-VL2-L2-VH2-L3-VH1-L4-CH1-L5-CL-Fc;
[0849] VH1-L1-VH2-L2-VL2-L3-VL1-L4-CH1-L5-CL-Fc;
[0850] VL1-L1-VL2-L2-VH2-L3-VH1-L4-CL-L5-CH1-Fc;
[0851] VH1-L1-VH2-L2-VL2-L3-VL1-L4-CL-L5-CH1-Fc;
[0852] VL1-L1-VL2-L2-VH2-L3-VH1-L4-CH1-L5-Fc;
[0853] VH1-L1-VH2-L2-VL2-L3-VL1-L4-CH1-L5-Fc;
[0854] VL1-L1-VL2-L2-VH2-L3-VH1-L4-CL-L5-Fc;
[0855] VH1-L1-VH2-L2-VL2-L3-VL1-L4-CL-L5-Fc;
[0856] VL1-L1-VL2-L2-VH2-L3-VH1-L4-CH1-L5-CL-L6-Fc;
[0857] VH1-L1-VH2-L2-VL2-L3-VL1-L4-CH1-L5-CL-L6-Fc;
[0858] VL1-L1-VL2-L2-VH2-L3-VH1-L4-CL-L5-CH1-L6-Fc; or
[0859] VH1-L1-VH2-L2-VL2-L3-VL1-L4-CL-L5-CH1-L6-Fc; and
[0860] wherein the second polypeptide has a structure represented by:
[0861] VL3-VL4-VH4-VH3-CH1-Fc;
[0862] VH3-VH4-VL4-VL3-CH1-Fc;
[0863] VL3-VL4-VH4-VH3-CL-Fc;
[0864] VH3-VH4-VL4-VL3-CL-Fc;
[0865] VL3-VL4-VH4-VH3-CH1-CL-Fc;
[0866] VH3-VH4-VL4-VL3-CH1-CL-Fc;
[0867] VL3-VL4-VH4-VH3-CL-CH1-Fc;
[0868] VH3-VH4-VL4-VL3-CL-CH1-Fc;
[0869] VL3-L7-VL4-L8-VH4-L9-VH3-L10-CH1-Fc;
[0870] VH3-L7-VH4-L8-VL4-L9-VL3-L10-CH1-Fc;
[0871] VL3-L7-VL4-L8-VH4-L9-VH3-L10-CL-Fc;
[0872] VH3-L7-VH4-L8-VL4-L9-VL3-L10-CL-Fc;
[0873] VL3-L7-VL4-L8-VH4-L9-VH3-L10-CH1-L11-CL-Fc;
[0874] VH3-L7-VH4-L8-VL4-L9-VL3-L10-CH1-L11-CL-Fc;
[0875] VL3-L7-VL4-L8-VH4-L9-VH3-L10-CL-L11-CH1-Fc;
[0876] VH3-L7-VH4-L8-VL4-L9-VL3-L10-CL-L11-CH1-Fc;
[0877] VL3-L7-VL4-L8-VH4-L9-VH3-L10-CH1-L11-Fc;
[0878] VH3-L7-VH4-L8-VL4-L9-VL3-L10-CH1-L11-Fc;
[0879] VL3-L7-VL4-L8-VH4-L9-VH3-L10-CL-L11-Fc;
[0880] VH3-L7-VH4-L8-VL4-L9-VL3-L10-CL-L11-Fc;
[0881] VL3-L7-VL4-L8-VH4-L9-VH3-L10-CH1-L11-CL-L12-Fc;
[0882] VH3-L7-VH4-L8-VL4-L9-VL3-L10-CH1-L11-CL-L12-Fc;
[0883] VL3-L7-VL4-L8-VH4-L9-VH3-L10-CL-L11-CH1-L12-Fc; or
[0884] VH3-L7-VH4-L8-VL4-L9-VL3-L10-CL-L11-CH1-L12-Fc;
[0885] wherein:
[0886] VL1 is a first immunoglobulin light chain variable region;
[0887] VL2 is a second immunoglobulin light chain variable region;
[0888] VL3 is a third immunoglobulin light chain variable region;
[0889] VL4 is a fourth immunoglobulin light chain variable region;
[0890] VH1 is a first immunoglobulin heavy chain variable region;
[0891] VH2 is a second immunoglobulin heavy chain variable region;
[0892] VH3 is a third immunoglobulin heavy chain variable region;
[0893] VH4 is a fourth immunoglobulin heavy chain variable region;
[0894] Fc is a region comprising an immunoglobulin heavy chain constant region 2 (CH2), an immunoglobulin heavy chain constant region 3 (CH3), and optionally, an immunoglobulin hinge;
[0895] CH1 is an immunoglobulin heavy chain constant region 1;
[0896] CL is an immunoglobulin light chain constant region; and
[0897] L1, L2, L3, L4, L5, L6, L7, L8, L9, L10, L11 and L12 are amino acid linkers.
[0898] 20. The antigen binding polypeptide complex of clause 11(i) or clause 11(ii), wherein the first polypeptide has a structure represented by:
[0899] VL1-VL2-VH2-VH1;
[0900] VH1-VH2-VL2-VL1;
[0901] VL1-VL2-VH2-VH1-Fc;
[0902] VH1-VH2-VL2-VL1-Fc;
[0903] VL1-VL2-VH2-VH1-CH1;
[0904] VH1-VH2-VL2-VL1-CH1;
[0905] VL1-VL2-VH2-VH1-CL;
[0906] VH1-VH2-VL2-VL1-CL;
[0907] VL1-VL2-VH2-VH1-CH1-CL;
[0908] VH1-VH2-VL2-VL1-CH1-CL;
[0909] VL1-VL2-VH2-VH1-CL-CH1;
[0910] VH1-VH2-VL2-VL1-CL-CH1;
[0911] VL1-VL2-VH2-VH1-CH1-Fc;
[0912] VH1-VH2-VL2-VL1-CH1-Fc;
[0913] VL1-VL2-VH2-VH1-CL-Fc;
[0914] VH1-VH2-VL2-VL1-CL-Fc;
[0915] VL1-VL2-VH2-VH1-CH1-CL-Fc;
[0916] VH1-VH2-VL2-VL1-CH1-CL-Fc;
[0917] VL1-VL2-VH2-VH1-CL-CH1-Fc;
[0918] VH1-VH2-VL2-VL1-CL-CH1-Fc;
[0919] VL1-L1-VL2-L2-VH2-L3-VH1;
[0920] VH1-L1-VH2-L2-VL2-L3-VL1;
[0921] VL1-L1-VL2-L2-VH2-L3-VH1-Fc;
[0922] VH1-L1-VH2-L2-VL2-L3-VL1-Fc;
[0923] VL1-L1-VL2-L2-VH2-L3-VH1-L4-Fc;
[0924] VH1-L1-VH2-L2-VL2-L3-VL1-L4-Fc;
[0925] VL1-L1-VL2-L2-VH2-L3-VH1-L4-CH1;
[0926] VH1-L1-VH2-L2-VL2-L3-VL1-L4-CH1;
[0927] VL1-L1-VL2-L2-VH2-L3-VH1-L4-CL;
[0928] VH1-L1-VH2-L2-VL2-L3-VL1-L4-CL;
[0929] VL1-L1-VL2-L2-VH2-L3-VH1-L4-CH1-L5-CL;
[0930] VH1-L1-VH2-L2-VL2-L3-VL1-L4-CH1-L5-CL;
[0931] VL1-L1-VL2-L2-VH2-L3-VH1-L4-CL-L5-CH1;
[0932] VH1-L1-VH2-L2-VL2-L3-VL1-L4-CL-L5-CH1;
[0933] VL1-L1-VL2-L2-VH2-L3-VH1-L4-CH1-Fc;
[0934] VH1-L1-VH2-L2-VL2-L3-VL1-L4-CH1-Fc;
[0935] VL1-L1-VL2-L2-VH2-L3-VH1-L4-CL-Fc;
[0936] VH1-L1-VH2-L2-VL2-L3-VL1-L4-CL-Fc;
[0937] VL1-L1-VL2-L2-VH2-L3-VH1-L4-CH1-L5-CL-Fc;
[0938] VH1-L1-VH2-L2-VL2-L3-VL1-L4-CH1-L5-CL-Fc;
[0939] VL1-L1-VL2-L2-VH2-L3-VH1-L4-CL-L5-CH1-Fc;
[0940] VH1-L1-VH2-L2-VL2-L3-VL1-L4-CL-L5-CH1-Fc;
[0941] VL1-L1-VL2-L2-VH2-L3-VH1-L4-CH1-L5-Fc;
[0942] VH1-L1-VH2-L2-VL2-L3-VL1-L4-CH1-L5-Fc;
[0943] VL1-L1-VL2-L2-VH2-L3-VH1-L4-CL-L5-Fc;
[0944] VH1-L1-VH2-L2-VL2-L3-VL1-L4-CL-L5-Fc;
[0945] VL1-L1-VL2-L2-VH2-L3-VH1-L4-CH1-L5-CL-L6-Fc;
[0946] VH1-L1-VH2-L2-VL2-L3-VL1-L4-CH1-L5-CL-L6-Fc;
[0947] VL1-L1-VL2-L2-VH2-L3-VH1-L4-CL-L5-CH1-L6-Fc; or
[0948] VH1-L1-VH2-L2-VL2-L3-VL1-L4-CL-L5-CH1-L6-Fc; and
[0949] wherein the second polypeptide has a structure represented by:
[0950] VL3-VL4-VH4-VH3;
[0951] VH3-VH4-VL4-VL3;
[0952] VL3-VL4-VH4-VH3-Fc;
[0953] VH3-VH4-VL4-VL3-Fc;
[0954] VL3-VL4-VH4-VH3-CH1;
[0955] VH3-VH4-VL4-VL3-CH1;
[0956] VL3-VL4-VH4-VH3-CL;
[0957] VH3-VH4-VL4-VL3-CL;
[0958] VL3-VL4-VH4-VH3-CH1-CL;
[0959] VH3-VH4-VL4-VL3-CH1-CL;
[0960] VL3-VL4-VH4-VH3-CL-CH1;
[0961] VH3-VH4-VL4-VL3-CL-CH1;
[0962] VL3-VL4-VH4-VH3-CH1-Fc;
[0963] VH3-VH4-VL4-VL3-CH1-Fc;
[0964] VL3-VL4-VH4-VH3-CL-Fc;
[0965] VH3-VH4-VL4-VL3-CL-Fc;
[0966] VL3-VL4-VH4-VH3-CH1-CL-Fc;
[0967] VH3-VH4-VL4-VL3-CH1-CL-Fc;
[0968] VL3-VL4-VH4-VH3-CL-CH1-Fc;
[0969] VH3-VH4-VL4-VL3-CL-CH1-Fc;
[0970] VL3-L7-VL4-L8-VH4-L9-VH3;
[0971] VH3-L7-VH4-L8-VL4-L9-VL3;
[0972] VL3-L7-VL4-L8-VH4-L9-VH3-Fc;
[0973] VH3-L7-VH4-L8-VL4-L9-VL3-Fc;
[0974] VL3-L7-VL4-L8-VH4-L9-VH3-L10-Fc;
[0975] VH3-L7-VH4-L8-VL4-L9-VL3-L10-Fc;
[0976] VL3-L7-VL4-L8-VH4-L9-VH3-L10-CH1;
[0977] VH3-L7-VH4-L8-VL4-L9-VL3-L10-CH1;
[0978] VL3-L7-VL4-L8-VH4-L9-VH3-L10-CL;
[0979] VH3-L7-VH4-L8-VL4-L9-VL3-L10-CL;
[0980] VL3-L7-VL4-L8-VH4-L9-VH3-L10-CH1-L11-CL;
[0981] VH3-L7-VH4-L8-VL4-L9-VL3-L10-CH1-L11-CL;
[0982] VL3-L7-VL4-L8-VH4-L9-VH3-L10-CL-L11-CH1;
[0983] VH3-L7-VH4-L8-VL4-L9-VL3-L10-CL-L11-CH1;
[0984] VL3-L7-VL4-L8-VH4-L9-VH3-L10-CH1-Fc;
[0985] VH3-L7-VH4-L8-VL4-L9-VL3-L10-CH1-Fc;
[0986] VL3-L7-VL4-L8-VH4-L9-VH3-L10-CL-Fc;
[0987] VH3-L7-VH4-L8-VL4-L9-VL3-L10-CL-Fc;
[0988] VL3-L7-VL4-L8-VH4-L9-VH3-L10-CH1-L11-CL-Fc;
[0989] VH3-L7-VH4-L8-VL4-L9-VL3-L10-CH1-L11-CL-Fc;
[0990] VL3-L7-VL4-L8-VH4-L9-VH3-L10-CL-L11-CH1-Fc;
[0991] VH3-L7-VH4-L8-VL4-L9-VL3-L10-CL-L11-CH1-Fc;
[0992] VL3-L7-VL4-L8-VH4-L9-VH3-L10-CH1-L11-Fc;
[0993] VH3-L7-VH4-L8-VL4-L9-VL3-L10-CH1-L11-Fc;
[0994] VL3-L7-VL4-L8-VH4-L9-VH3-L10-CL-L11-Fc;
[0995] VH3-L7-VH4-L8-VL4-L9-VL3-L10-CL-L11-Fc;
[0996] VL3-L7-VL4-L8-VH4-L9-VH3-L10-CH1-L11-CL-L12-Fc;
[0997] VH3-L7-VH4-L8-VL4-L9-VL3-L10-CH1-L11-CL-L12-Fc;
[0998] VL3-L7-VL4-L8-VH4-L9-VH3-L10-CL-L11-CH1-L12-Fc; or
[0999] VH3-L7-VH4-L8-VL4-L9-VL3-L10-CL-L11-CH1-L12-Fc;
[1000] wherein:
[1001] VL1 is a first immunoglobulin light chain variable region;
[1002] VL2 is a second immunoglobulin light chain variable region;
[1003] VL3 is a third immunoglobulin light chain variable region;
[1004] VL4 is a fourth immunoglobulin light chain variable region;
[1005] VH1 is a first immunoglobulin heavy chain variable region;
[1006] VH2 is a second immunoglobulin heavy chain variable region;
[1007] VH3 is a third immunoglobulin heavy chain variable region;
[1008] VH4 is a fourth immunoglobulin heavy chain variable region;
[1009] Fc is a region comprising an immunoglobulin heavy chain constant region 2 (CH2), an immunoglobulin heavy chain constant region 3 (CH3), and optionally, an immunoglobulin hinge;
[1010] CH1 is an immunoglobulin heavy chain constant region 1;
[1011] CL is an immunoglobulin light chain constant region; and
[1012] L1, L2, L3, L4, L5, L6, L7, L8, L9, L10, L11 and L12 are amino acid linkers.
[1013] 21. The antigen binding polypeptide complex of clause 11(i) or clause 11(ii), wherein the first polypeptide has a structure represented by:
[1014] VL1-VL2-VH2-VH1;
[1015] VH1-VH2-VL2-VL1;
[1016] VL1-L1-VL2-L2-VH2-L3-VH1;
[1017] VH1-L1-VH2-L2-VL2-L3-VL1;
[1018] VL1-VL2-VH2-VH1-Fc;
[1019] VH1-VH2-VL2-VL1-Fc;
[1020] VL1-L1-VL2-L2-VH2-L3-VH1-Fc;
[1021] VH1-L1-VH2-L2-VL2-L3-VL1-Fc;
[1022] VL1-L1-VL2-L2-VH2-L3-VH1-L4-Fc;
[1023] VH1-L1-VH2-L2-VL2-L3-VL1-L4-Fc;
[1024] VL1-VL2-VH2-VH1-CH1;
[1025] VH1-VH2-VL2-VL1-CH1;
[1026] VL1-VL2-VH2-VH1-CL;
[1027] VH1-VH2-VL2-VL1-CL;
[1028] VL1-VL2-VH2-VH1-CH1-CL;
[1029] VH1-VH2-VL2-VL1-CH1-CL;
[1030] VL1-VL2-VH2-VH1-CL-CH1;
[1031] VH1-VH2-VL2-VL1-CL-CH1;
[1032] VL1-L1-VL2-L2-VH2-L3-VH1-L4-CH1;
[1033] VH1-L1-VH2-L2-VL2-L3-VL1-L4-CH1;
[1034] VL1-L1-VL2-L2-VH2-L3-VH1-L4-CL;
[1035] VH1-L1-VH2-L2-VL2-L3-VL1-L4-CL;
[1036] VL1-L1-VL2-L2-VH2-L3-VH1-L4-CH1-L5-CL;
[1037] VH1-L1-VH2-L2-VL2-L3-VL1-L4-CH1-L5-CL;
[1038] VL1-L1-VL2-L2-VH2-L3-VH1-L4-CL-L5-CH1;
[1039] VH1-L1-VH2-L2-VL2-L3-VL1-L4-CL-L5-CH1;
[1040] VL1-VL2-VH2-VH1-CH1-Fc;
[1041] VH1-VH2-VL2-VL1-CH1-Fc;
[1042] VL1-VL2-VH2-VH1-CL-Fc;
[1043] VH1-VH2-VL2-VL1-CL-Fc;
[1044] VL1-VL2-VH2-VH1-CH1-CL-Fc;
[1045] VH1-VH2-VL2-VL1-CH1-CL-Fc;
[1046] VL1-VL2-VH2-VH1-CL-CH1-Fc;
[1047] VH1-VH2-VL2-VL1-CL-CH1-Fc;
[1048] VL1-L1-VL2-L2-VH2-L3-VH1-L4-CH1-Fc;
[1049] VH1-L1-VH2-L2-VL2-L3-VL1-L4-CH1-Fc;
[1050] VL1-L1-VL2-L2-VH2-L3-VH1-L4-CL-Fc;
[1051] VH1-L1-VH2-L2-VL2-L3-VL1-L4-CL-Fc;
[1052] VL1-L1-VL2-L2-VH2-L3-VH1-L4-CH1-L5-CL-Fc;
[1053] VH1-L1-VH2-L2-VL2-L3-VL1-L4-CH1-L5-CL-Fc;
[1054] VL1-L1-VL2-L2-VH2-L3-VH1-L4-CL-L5-CH1-Fc;
[1055] VH1-L1-VH2-L2-VL2-L3-VL1-L4-CL-L5-CH1-Fc;
[1056] VL1-L1-VL2-L2-VH2-L3-VH1-L4-CH1-L5-Fc;
[1057] VH1-L1-VH2-L2-VL2-L3-VL1-L4-CH1-L5-Fc;
[1058] VL1-L1-VL2-L2-VH2-L3-VH1-L4-CL-L5-Fc;
[1059] VH1-L1-VH2-L2-VL2-L3-VL1-L4-CL-L5-Fc;
[1060] VL1-L1-VL2-L2-VH2-L3-VH1-L4-CH1-L5-CL-L6-Fc;
[1061] VH1-L1-VH2-L2-VL2-L3-VL1-L4-CH1-L5-CL-L6-Fc;
[1062] VL1-L1-VL2-L2-VH2-L3-VH1-L4-CL-L5-CH1-L6-Fc; or
[1063] VH1-L1-VH2-L2-VL2-L3-VL1-L4-CL-L5-CH1-L6-Fc; and
[1064] wherein the second polypeptide has a structure represented by:
[1065] Fc;
[1066] VL1-VL2-VH2-VH1;
[1067] VH1-VH2-VL2-VL1;
[1068] VL1-L1-VL2-L2-VH2-L3-VH1;
[1069] VH1-L1-VH2-L2-VL2-L3-VL1;
[1070] VL1-VL2-VH2-VH1-Fc;
[1071] VH1-VH2-VL2-VL1-Fc;
[1072] VL1-L1-VL2-L2-VH2-L3-VH1-Fc;
[1073] VH1-L1-VH2-L2-VL2-L3-VL1-Fc;
[1074] VL1-L1-VL2-L2-VH2-L3-VH1-L4-Fc;
[1075] VH1-L1-VH2-L2-VL2-L3-VL1-L4-Fc;
[1076] VL1-VL2-VH2-VH1-CH1;
[1077] VH1-VH2-VL2-VL1-CH1;
[1078] VL1-VL2-VH2-VH1-CL;
[1079] VH1-VH2-VL2-VL1-CL;
[1080] VL1-VL2-VH2-VH1-CH1-CL;
[1081] VH1-VH2-VL2-VL1-CH1-CL;
[1082] VL1-VL2-VH2-VH1-CL-CH1;
[1083] VH1-VH2-VL2-VL1-CL-CH1;
[1084] VL1-L1-VL2-L2-VH2-L3-VH1-L4-CH1;
[1085] VH1-L1-VH2-L2-VL2-L3-VL1-L4-CH1;
[1086] VL1-L1-VL2-L2-VH2-L3-VH1-L4-CL;
[1087] VH1-L1-VH2-L2-VL2-L3-VL1-L4-CL;
[1088] VL1-L1-VL2-L2-VH2-L3-VH1-L4-CH1-L5-CL;
[1089] VH1-L1-VH2-L2-VL2-L3-VL1-L4-CH1-L5-CL;
[1090] VL1-L1-VL2-L2-VH2-L3-VH1-L4-CL-L5-CH1;
[1091] VH1-L1-VH2-L2-VL2-L3-VL1-L4-CL-L5-CH1;
[1092] VL1-VL2-VH2-VH1-CH1-Fc;
[1093] VH1-VH2-VL2-VL1-CH1-Fc;
[1094] VL1-VL2-VH2-VH1-CL-Fc;
[1095] VH1-VH2-VL2-VL1-CL-Fc;
[1096] VL1-VL2-VH2-VH1-CH1-CL-Fc;
[1097] VH1-VH2-VL2-VL1-CH1-CL-Fc;
[1098] VL1-VL2-VH2-VH1-CL-CH1-Fc;
[1099] VH1-VH2-VL2-VL1-CL-CH1-Fc;
[1100] VL1-L1-VL2-L2-VH2-L3-VH1-L4-CH1-Fc;
[1101] VH1-L1-VH2-L2-VL2-L3-VL1-L4-CH1-Fc;
[1102] VL1-L1-VL2-L2-VH2-L3-VH1-L4-CL-Fc;
[1103] VH1-L1-VH2-L2-VL2-L3-VL1-L4-CL-Fc;
[1104] VL1-L1-VL2-L2-VH2-L3-VH1-L4-CH1-L5-CL-Fc;
[1105] VH1-L1-VH2-L2-VL2-L3-VL1-L4-CH1-L5-CL-Fc;
[1106] VL1-L1-VL2-L2-VH2-L3-VH1-L4-CL-L5-CH1-Fc;
[1107] VH1-L1-VH2-L2-VL2-L3-VL1-L4-CL-L5-CH1-Fc;
[1108] VL1-L1-VL2-L2-VH2-L3-VH1-L4-CH1-L5-CL-Fc;
[1109] VH1-L1-VH2-L2-VL2-L3-VL1-L4-CH1-L5-CL-Fc;
[1110] VL1-L1-VL2-L2-VH2-L3-VH1-L4-CH1-L5-Fc;
[1111] VH1-L1-VH2-L2-VL2-L3-VL1-L4-CH1-L5-Fc;
[1112] VL1-L1-VL2-L2-VH2-L3-VH1-L4-CL-L5-Fc;
[1113] VH1-L1-VH2-L2-VL2-L3-VL1-L4-CL-L5-Fc;
[1114] VL1-L1-VL2-L2-VH2-L3-VH1-L4-CH1-L5-CL-L6-Fc;
[1115] VH1-L1-VH2-L2-VL2-L3-VL1-L4-CH1-L5-CL-L6-Fc;
[1116] VL1-L1-VL2-L2-VH2-L3-VH1-L4-CL-L5-CH1-L6-Fc; or
[1117] VH1-L1-VH2-L2-VL2-L3-VL1-L4-CL-L5-CH1-L6-Fc;
[1118] wherein:
[1119] VL1 is a first immunoglobulin light chain variable region;
[1120] VL2 is a second immunoglobulin light chain variable region;
[1121] VH1 is a first immunoglobulin heavy chain variable region;
[1122] VH2 is a second immunoglobulin heavy chain variable region;
[1123] CH1 is an immunoglobulin heavy chain constant region 1;
[1124] CL is an immunoglobulin light chain constant region;
[1125] Fc is a region comprising an immunoglobulin heavy chain constant region 2 (CH2), an immunoglobulin heavy chain constant region 3 (CH3), and optionally, an immunoglobulin hinge; and
[1126] L1, L2, L3, L4, L5 and L6 are amino acid linkers.
[1127] 22. The antigen binding polypeptide complex of clause 11(ii), wherein the first polypeptide has a structure represented by:
[1128] VL1-VL2-VH2-VH1-CH1-Fc;
[1129] VH1-VH2-VL2-VL1-CH1-Fc;
[1130] VL1-VL2-VH2-VH1-CL-Fc;
[1131] VH1-VH2-VL2-VL1-CL-Fc;
[1132] VL1-VL2-VH2-VH1-CH1-CL-Fc;
[1133] VH1-VH2-VL2-VL1-CH1-CL-Fc;
[1134] VL1-VL2-VH2-VH1-CL-CH1-Fc;
[1135] VH1-VH2-VL2-VL1-CL-CH1-Fc;
[1136] VL1-L1-VL2-L2-VH2-L3-VH1-L4-CH1-Fc;
[1137] VH1-L1-VH2-L2-VL2-L3-VL1-L4-CH1-Fc;
[1138] VL1-L1-VL2-L2-VH2-L3-VH1-L4-CL-Fc;
[1139] VH1-L1-VH2-L2-VL2-L3-VL1-L4-CL-Fc;
[1140] VL1-L1-VL2-L2-VH2-L3-VH1-L4-CH1-L5-CL-Fc;
[1141] VH1-L1-VH2-L2-VL2-L3-VL1-L4-CH1-L5-CL-Fc;
[1142] VL1-L1-VL2-L2-VH2-L3-VH1-L4-CL-L5-CH1-Fc;
[1143] VH1-L1-VH2-L2-VL2-L3-VL1-L4-CL-L5-CH1-Fc;
[1144] VL1-L1-VL2-L2-VH2-L3-VH1-L4-CH1-L5-Fc;
[1145] VH1-L1-VH2-L2-VL2-L3-VL1-L4-CH1-L5-Fc;
[1146] VL1-L1-VL2-L2-VH2-L3-VH1-L4-CL-L5-Fc;
[1147] VH1-L1-VH2-L2-VL2-L3-VL1-L4-CL-L5-Fc;
[1148] VL1-L1-VL2-L2-VH2-L3-VH1-L4-CH1-L5-CL-L6-Fc;
[1149] VH1-L1-VH2-L2-VL2-L3-VL1-L4-CH1-L5-CL-L6-Fc;
[1150] VL1-L1-VL2-L2-VH2-L3-VH1-L4-CL-L5-CH1-L6-Fc; or
[1151] VH1-L1-VH2-L2-VL2-L3-VL1-L4-CL-L5-CH1-L6-Fc;
[1152] wherein the second polypeptide has a structure represented by:
[1153] Fc;
[1154] VL1-VL2-VH2-VH1-CH1-Fc;
[1155] VH1-VH2-VL2-VL1-CH1-Fc;
[1156] VL1-VL2-VH2-VH1-CL-Fc;
[1157] VH1-VH2-VL2-VL1-CL-Fc;
[1158] VL1-VL2-VH2-VH1-CH1-CL-Fc;
[1159] VH1-VH2-VL2-VL1-CH1-CL-Fc;
[1160] VL1-VL2-VH2-VH1-CL-CH1-Fc;
[1161] VH1-VH2-VL2-VL1-CL-CH1-Fc;
[1162] VL1-L1-VL2-L2-VH2-L3-VH1-L4-CH1-Fc;
[1163] VH1-L1-VH2-L2-VL2-L3-VL1-L4-CH1-Fc;
[1164] VL1-L1-VL2-L2-VH2-L3-VH1-L4-CL-Fc;
[1165] VH1-L1-VH2-L2-VL2-L3-VL1-L4-CL-Fc;
[1166] VL1-L1-VL2-L2-VH2-L3-VH1-L4-CH1-L5-CL-Fc;
[1167] VH1-L1-VH2-L2-VL2-L3-VL1-L4-CH1-L5-CL-Fc;
[1168] VL1-L1-VL2-L2-VH2-L3-VH1-L4-CL-L5-CH1-Fc;
[1169] VH1-L1-VH2-L2-VL2-L3-VL1-L4-CL-L5-CH1-Fc;
[1170] VL1-L1-VL2-L2-VH2-L3-VH1-L4-CH1-L5-Fc;
[1171] VH1-L1-VH2-L2-VL2-L3-VL1-L4-CH1-L5-Fc;
[1172] VL1-L1-VL2-L2-VH2-L3-VH1-L4-CL-L5-Fc;
[1173] VH1-L1-VH2-L2-VL2-L3-VL1-L4-CL-L5-Fc;
[1174] VL1-L1-VL2-L2-VH2-L3-VH1-L4-CH1-L5-CL-L6-Fc;
[1175] VH1-L1-VH2-L2-VL2-L3-VL1-L4-CH1-L5-CL-L6-Fc;
[1176] VL1-L1-VL2-L2-VH2-L3-VH1-L4-CL-L5-CH1-L6-Fc; or
[1177] VH1-L1-VH2-L2-VL2-L3-VL1-L4-CL-L5-CH1-L6-Fc;
[1178] wherein:
[1179] VL1 is a first immunoglobulin light chain variable region;
[1180] VL2 is a second immunoglobulin light chain variable region;
[1181] VH1 is a first immunoglobulin heavy chain variable region;
[1182] VH2 is a second immunoglobulin heavy chain variable region;
[1183] CH1 is an immunoglobulin heavy chain constant region 1;
[1184] CL is an immunoglobulin light chain constant region;
[1185] Fc is a region comprising an immunoglobulin heavy chain constant region 2 (CH2), an immunoglobulin heavy chain constant region 3 (CH3), and optionally, an immunoglobulin hinge; and
[1186] L1, L2, L3, L4, L5 and L6 are amino acid linkers.
[1187] 23. The antigen binding polypeptide or the antigen binding polypeptide complex of any one of clauses 1-22, wherein VL1, VL2, VH1 and/or VH2 specifically binds to at least one epitope on at least one antigen selected from the group consisting of A2AR, APRIL, ATPDase, BAFF, BAFFR, BCMA, BlyS, BTK, BTLA, B7DC, B7H1, B7H2, B7H3, B7H4, B7H5, B7H6, B7H7, B7RP1, B7-4, C3, C5, CCL2, CCL3, CCL4, CCL5, CCL7, CCL8, CCL11, CCL15, CCL17, CCL19, CCL20, CCL21, CCL25, CCR3, CCR4, CD3, CD16A, CD19, CD20, CD24, CD27, CD28, CD30, CD38, CD39, CD40, CD40L, CD47, CD52, CD70, CD80, CD86, CD123, CD133, CD137, CD137L, CD160, CD272, CEACAM5, CLEC9, CLEC91, CRTH2, CSF-1, CSF-2, CSF-3, CXCL1, CXCL2, CXCL4, CXCL12, CXCL13, CXCR3, cMet, CTLA4, DLL3, DLL4, DNGR-1, E-cadherin, EGFR, ENTPD1, EpCAM, FCER1, FCER1A, FCER2, FGFR, FLAP, FOLH1, Gi24, GITR, GITRL, GPR5, GP100, GPRC5D, HER2, HER3, ICOSL, ICOS, HHLA2, HMGB1, HVEM, IDO, IFNa, IgE, IGF1R, IL2Rbeta, IL1, ILIA, IL1B, IL1F10, IL2, IL4, IL4Ra, IL5, IL5R, IL6, IL7, IL7Ra, IL8, IL9, IL9R, IL10, rhIL1O, IL12, IL13, IL13Ra1, IL13Ra2, IL15, IL17, IL17Rb, IL18, IL22, IL23, IL25, IL7, IL33, IL35, ITGB4, ITK, KIR, LAG3, LAMP1, leptin, LPFS2, MHC class II, MUC-1, MUC-16, NCR3LG1, NKG2D, NKp46, NTPDase-1, OX40, OX40L, PD-1, PD-L1, PD-L2, PROM1, S152, SIRPalpha, SISP1, SLC, SPG64, ST2, STEAP1, STEAP2, Syk kinase, STEAP1, TROP2, TACI, TDO, TGFBETA, T14, TIGIT, TIM3, TLR, TLR2, TLR4, TLR5, TLR9, TMEF1, TNFa, TNFRSF7, Tp55, TREM1, TSLP, TSLPR, TWEAK, VEGF, VISTA, Vstm3, and WUCAM;
[1188] optionally wherein
[1189] VL1, VL2, VL3, VL4, VH1, VH2, VH3 and/or VH4 specifically binds to at least one epitope on at least one antigen selected from the group consisting of A2AR, APRIL, ATPDase, BAFF, BAFFR, BCMA, BlyS, BTK, BTLA, B7DC, B7H1, B7H2, B7H3, B7H4, B7H5, B7H6, B7H7, B7RP1, B7-4, C3, C5, CCL2, CCL3, CCL4, CCL5, CCL7, CCL8, CCL11, CCL15, CCL17, CCL19, CCL20, CCL21, CCL25, CCR3, CCR4, CD3, CD16A, CD19, CD20, CD24, CD27, CD28, CD30, CD38, CD39, CD40, CD40L, CD47, CD52, CD70, CD80, CD86, CD123, CD133, CD137, CD137L, CD160, CD272, CEACAM5, CLEC9, CLEC91, CRTH2, CSF-1, CSF-2, CSF-3, CXCL1, CXCL2, CXCL4, CXCL12, CXCL13, CXCR3, cMet, CTLA4, DLL3, DLL4, DNGR-1, E-cadherin, EGFR, ENTPD1, EpCAM, FCER1, FCER1A, FCER2, FGFR, FLAP, FOLH1, Gi24, GITR, GITRL, GPR5, GP100, GPRC5D, HER2, HER3, ICOSL, ICOS, HHLA2, HMGB1, HVEM, IDO, IFNa, IgE, IGF1R, IL2Rbeta, IL1, ILIA, IL1B, IL1F10, IL2, IL4, IL4Ra, IL5, IL5R, IL6, IL7, IL7Ra, IL8, IL9, IL9R, IL10, rhIL1O, IL12, IL13, IL13Ra1, IL13Ra2, IL15, IL17, IL17Rb, IL18, IL22, IL23, IL25, IL7, IL33, IL35, ITGB4, ITK, KIR, LAG3, LAMP1, leptin, LPFS2, MHC class II, MUC-1, MUC-16, NCR3LG1, NKG2D, NKp46, NTPDase-1, OX40, OX40L, PD-1, PD-L1, PD-L2, PROM1, S152, SIRPalpha, SISP1, SLC, SPG64, ST2, STEAP1, STEAP2, Syk kinase, STEAP1, TROP2, TACI, TDo, TGFBETA, T14, TIGIT, TIM3, TLR, TLR2, TLR4, TLR5, TLR9, TMEF1, TNFa, TNFRSF7, Tp55, TREM1, TSLP, TSLPR, TWEAK, VEGF, VISTA, Vstm3, and WUCAM.
[1190] 24. The antigen binding polypeptide or antigen binding polypeptide complex of clause 23, wherein:
   [1191] (i) VH1 and VL1 specifically bind to CD28 and VH2 and VL2 specifically bind to CD3;
   [1192] (ii) VH1 and VL1 specifically bind to CD3 and VH2 and VL2 specifically bind to CD28;
   [1193] (iii) VH1 and VL1 specifically bind to CD19 and VH2 and VL2 specifically bind to CD38;
   [1194] (iv) VH1 and VL1 specifically bind to CD38 and VH2 and VL2 specifically bind to CD19;
   [1195] (v) VH1 and VL1 specifically bind to CD3 and VH2 and VL2 specifically bind to CD19;
   [1196] (vi) VH1 and VL1 specifically bind to CD19 and VH2 and VL2 specifically bind to CD3;
   [1197] (vii) VH1 and VL1 specifically bind to CD3 and VH2 and VL2 specifically bind to CD38;
   [1198] (viii) VH1 and VL1 specifically bind to CD38 and VH2 and VL2 specifically bind to CD3;
   [1199] (ix) VH1 and VL1 specifically bind to CD19 and VH2 and VL2 specifically bind to CD28;
   [1200] (x) VH1 and VL1 specifically bind to CD28 and VH2 and VL2 specifically bind to CD19;
   [1201] (xi) VH1 and VL1 specifically bind to CD28 and VH2 and VL2 specifically bind to CD38;
   [1202] (xii) VH1 and VL1 specifically bind to CD38 and VH2 and VL2 specifically bind to CD28;
   [1203] (xiii) VH1 and VL1 specifically bind to CD3 and VH2 and VL2
   [1204] specifically bind to Her2; or
   [1205] (xiv) VH1 and VL1 specifically bind to Her2 and VH2 and VL2 specifically bind to CD3.
[1206] 25. The antigen binding polypeptide or antigen binding polypeptide complex of clause 23 or clause 24, wherein:
[1207] (i) VH1 and VL1 specifically bind to CD3; VH2 and VL2 specifically bind to CD28; VH3 and VL3 specifically bind to CD19; and VH4 and VL4 specifically bind to CD38;
[1208] (ii) VH1 and VL1 specifically bind to CD3; VH2 and VL2 specifically bind to CD28; VH3 and VL3 specifically bind to CD38; and VH4 and VL4 specifically bind to CD19;
[1209] (iii) VH1 and VL1 specifically bind to CD28; VH2 and VL2 specifically bind to CD3; VH3 and VL3 specifically bind to CD19; and VH4 and VL4 specifically bind to CD38; or
[1210] (iv) VH1 and VL1 specifically bind to CD28; VH2 and VL2 specifically bind to CD3; VH3 and VL3 specifically bind to CD38; and VH4 and VL4 specifically bind to CD19.
[1211] 26. The antigen binding polypeptide or antigen binding polypeptide complex of any one of clauses 1-22, which specifically binds to a viral peptide, protein, polypeptide, or a fragment thereof, optionally wherein the VL1, VL2, VL3, VL4, VH1, VH2, VH3 and/or VH4 specifically binds to at least one epitope on at least one antigen of a viral peptide, protein, polypeptide, or a fragment thereof.
[1212] 27. The antigen binding polypeptide or antigen binding polypeptide complex of clause 26, wherein the viral peptide, protein, polypeptide, or a fragment is from: influenza virus neuraminidase, influenza virus hemagglutinin, human respiratory syncytial virus (RSV)-viral proteins, RSV F glycoprotein, RSV G glycoprotein, herpes simplex virus (HSV) viral proteins, herpes simplex virus glycoproteins gB, gC, gD, and gE, Chlamydia MOMP and PorB antigens, core protein, matrix protein or other protein of Dengue virus, measles virus hemagglutinin, herpes simplex virus type 2 glycoprotein gB, poliovirus 1 VP1, envelope glycoproteins of HIV 1, hepatitis B surface antigen, diptheria toxin, Streptococcus 24M epitope, gonococcal pilin, pseudorabies virus g50 (gpD), pseudorabies virus II (gpB), pseudorabies virus III (gpC), pseudorabies virus glycoprotein H, pseudorabies virus glycoprotein E, transmissible gastroenteritis glycoprotein 195, transmissible gastroenteritis matrix protein, swine rotavirus glycoprotein 38, swine parvovirus capsid protein, Serpulinahydodysenteriae protective antigen, bovine viral diarrhea glycoprotein 55, Newcastle disease virus hemagglutinin-neuraminidase, swine flu hemagglutinin, swine flu neuraminidase, foot and mouth disease virus, hog colera virus, swine influenza virus, African swine fever virus, Mycoplasma liyopneutiioniae, infectious bovine rhinotracheitis virus, infectious bovine rhinotracheitis virus glycoprotein E, glycoprotein G, infectious laryngotracheitis virus, infectious laryngotracheitis virus glycoprotein G or glycoprotein I, a glycoprotein of La Crosse virus, neonatal calf diarrhoea virus, Venezuelan equine encephalomyelitis virus, punta toro virus, murine leukemia virus, mouse mammary tumor virus, hepatitis B virus core protein and hepatitis B virus surface antigen or a fragment or derivative thereof, antigen of equine influenza virus or equine herpes virus, including equine influenza virus type A/Alaska 91 neuraminidase, equine influenza virus typeA/Miami 63 neuraminidase, equine influenza virus type A/Kentucky 81 neuraminidase equine herpes virus type 1 glycoprotein B, and equine herpes virus type 1 glycoprotein D, antigen of bovine respiratory syncytial virus or bovine parainfluenza virus, bovine respiratory syncytial virus attachment protein (BRSV G), bovine respiratory syncytial virus fusion protein (BRSV F), bovine respiratory syncytial virus nucleocapsid protein (BRSVN), bovine parainfluenza virus type 3 fusion protein, bovine parainfluenza virus type 3 hemagglutinin neuraminidase, bovine E viral diarrhoea virus glycoprotein 48 and glycoprotein 53, glycoprotein E of Dengue virus, or glycoprotein ElE2 of human hepatitis C virus.
[1213] 28. The antigen binding polypeptide or the antigen binding polypeptide complex of any one of clauses 1-22, wherein VL1, VL2, VH1 and/or VH2 specifically binds to an HIV protein;
[1214] optionally wherein VL1, VL2, VL3, VL4, VH1, VH2, VH3 and/or VH4 specifically binds to an HIV protein.
[1215] 29. The antigen binding polypeptide or antigen binding polypeptide complex of clause 28, wherein VH1, VH2, VH3 and/or VH4 specifically bind to different HIV proteins or to different epitopes on the same HIV protein.
[1216] 30. The antigen binding polypeptide or antigen binding polypeptide complex of clause 28 or clause 29, wherein VL1, VL2, VL3 and/or VL4 specifically bind to different HIV proteins or to different epitopes on the same HIV protein.
[1217] 31. The antigen binding polypeptide or antigen binding polypeptide complex of any one of clauses 28-30, wherein the HIV protein is an HIV envelope protein, an HIV structural protein, an HIV functional protein, or an HIV accessory protein.
[1218] 32. The antigen binding polypeptide or antigen binding polypeptide complex of clause 31, wherein the HIV envelope protein is HIV envelope glycoprotein (Env), HIV envelope glycoprotein gp160, HIV envelope surface glycoprotein gp120, or HIV transmembrane envelope protein gp41.
[1219] 33. The antigen binding polypeptide or antigen binding polypeptide complex of clause 31, wherein the HIV structural protein is p17, p24, p7 or p55.
[1220] 34. The antigen binding polypeptide or antigen binding polypeptide complex of clause 31, wherein the HIV functional protein is p66, HIV-1 protease (PR) or p31.
[1221] 35. The antigen binding polypeptide or antigen binding polypeptide complex of clause 31, wherein the HIV accessory protein is Nef, Tat, Rev, Vif, Vpr or Vpu.
[1222] 36. The antigen binding polypeptide or antigen binding polypeptide complex of any one of clauses 28-35, wherein VH1 is a first immunoglobulin heavy chain variable region that specifically binds to at least one epitope on at least one antigen selected from the group consisting of Env, gp160, gp120, gp41, p17, p24, p7, p55, p66, p31, Nef, Tat, Rev, Vif, Vpr and Vpu; VH2 is a second immunoglobulin heavy chain variable region that specifically binds to at least one epitope on at least one antigen selected from the group consisting of Env, gp160, gp120, gp41, p17, p24, p7, p55, p66, p31, Nef, Tat, Rev, Vif, Vpr and Vpu; VH3 is a third immunoglobulin heavy chain variable region that specifically binds to at least one epitope on at least one antigen selected from the group consisting of Env, gp160, gp120, gp41, p17, p24, p7, p55, p66, p31, Nef, Tat, Rev, Vif, Vpr and Vpu; VH4 is a fourth immunoglobulin heavy chain variable region that specifically binds to at least one epitope on at least one antigen selected from the group consisting of Env, gp160, gp120, gp41, p17, p24, p7, p55, p66, p31, Nef, Tat, Rev, Vif, Vpr and Vpu; VL1 is a first immunoglobulin light chain variable region that specifically binds to at least one epitope on at least one antigen selected from the group consisting of Env, gp160, gp120, gp41, p17, p24, p7, p55, p66, p31, Nef, Tat, Rev, Vif, Vpr and Vpu; VL2 is a second immunoglobulin light chain variable region that specifically binds to at least one epitope on at least one antigen selected from the group consisting of Env, gp160, gp120, gp41, p17, p24, p7, p55, p66, p31, Nef, Tat, Rev, Vif, Vpr and Vpu; VL3 is a third immunoglobulin light chain variable region that specifically binds to at least one epitope on at least one antigen selected from the group consisting of Env, gp160, gp120, gp41, p17, p24, p7, p55, p66, p31, Nef, Tat, Rev, Vif, Vpr and Vpu; and/or VL4 is a fourth immunoglobulin light chain variable region that specifically binds to at least one epitope on at least one antigen selected from the group consisting of Env, gp160, gp120, gp41, p17, p24, p7, p55, p66, p31, Nef, Tat, Rev, Vif, Vpr and Vpu.
[1223] 37. The antigen binding polypeptide or antigen binding polypeptide complex of clause 28-35, wherein
[1224] VL1 is a first immunoglobulin light chain variable region that specifically binds to at least one epitope on at least one antigen selected from the group consisting of Env, gp160, gp120, gp41, p17, p24, p7, p55, p66, p31, Nef, Tat, Rev, Vif, Vpr and Vpu;
[1225] VL2 is a second immunoglobulin light chain variable region that specifically binds to at least one epitope on at least one antigen selected from the group consisting of Env, gp160, gp120, gp41, p17, p24, p7, p55, p66, p31, Nef, Tat, Rev, Vif, Vpr and Vpu;
[1226] VH1 is a first immunoglobulin heavy chain variable region that specifically binds to at least one epitope on at least one antigen selected from the group consisting of Env, gp160, gp120, gp41, p17, p24, p7, p55, p66, p31, Nef, Tat, Rev, Vif, Vpr and Vpu; and/or
[1227] VH2 is a second immunoglobulin heavy chain variable region that specifically binds to at least one epitope on at least one antigen selected from the group consisting of Env, gp160, gp120, gp41, p17, p24, p7, p55, p66, p31, Nef, Tat, Rev, Vif, Vpr and Vpu.
[1228] 38. The antigen binding polypeptide or antigen binding polypeptide complex of any one of clauses 28-37, wherein one or more of VH1, VH2, VH3, and VH4 comprises an amino acid sequence having at least 90% identity to any one of SEQ ID NOs:338-341, optionally wherein one or more of VH1, VH2, VH3, and VH4 comprises an amino acid sequence having at least 95% or 100% identity to any one of SEQ ID NOs:338-341.
[1229] 39. The antigen binding polypeptide or antigen binding polypeptide complex of any one of clauses 28-38, wherein one or more of VL1, VL2, VL3 and VL4 comprises an amino acid sequence having at least 90% identity to any one of SEQ ID NOs:342-345, optionally wherein one or more of VL1, VL2, VL3 and VL4 comprises an amino acid sequence having at least 95% identity, or 100% identity to any one of SEQ ID NOs:342-345.
[1230] 40. The antigen binding polypeptide or antigen binding polypeptide complex of any one of clauses 1-39, wherein the immunoglobulin hinge comprises an upper hinge region, a middle hinge region, a lower hinge region, or a combination thereof.
[1231] 41. The antigen binding polypeptide of any one of clauses 1-10 and 23-40, wherein linkers L1, L2, L3, L4, L5, L6, L7, L8, L9, L10, L11 and/or L12 have a length of from about 1 amino acid to about 50 amino acids.
[1232] 42. The antigen binding polypeptide complex of any one of clauses 11-40, wherein linkers L1, L2, L3, L4, L5, L6, L7, L8, L9, L10, L11 and/or L12 of the first polypeptide and/or the second polypeptide have a length of from about 1 amino acid to about 50 amino acids.
[1233] 43. The antigen binding polypeptide or antigen binding polypeptide complex of any one of clauses 1-42, wherein linkers L1, L2, L3, L4, L5, L6, L7, L8, L9, L10, L11 and/or L12 comprise the amino acid sequence of g, a, gss, asg, ggssg, gssgs, gtvaa, asggs, astgg, asggsg, ggsggssgss, sggsgssggs, ggsggsgsgggsasgsg, ggsggsgsggggsasgsg, gggssggggsggsgsggsgs, ggggsggsgsggggsasgsg, gggssggsgsggsgsggsgs, sggssggsgsggsgsggsgssg, gsgssggggsggsgsggsgssg, ggggsgsggsgggssggggsggggsggggsggggsggggs, ggggsggggsggggsggggsggggsggggsggggsggggs, ggggsgsggsgggssggggsggggsggggsggggsggggssss, ggggsgsggsgggssggggsggggsggggsggggsggggssssgs, ggsgg, gsggsagsgsggggsasgsg, ggggs, or gsggsggsgsggggsasgsg (SEQ ID NOs:1-19 and 681-688) or a sequence having at least 50%, at least 60%, at least 70%, at least 80%, at least 90%, or at least 95% identity to any one of SEQ ID NOs:1-19 and 681-688.
[1234] 44. The antigen binding polypeptide or antigen binding polypeptide complex of any one of clauses 1-43, wherein the amino acid linkers are non-immunogenic.
[1235] 45. The antigen binding polypeptide or antigen binding polypeptide complex of any one of clauses 1-44, wherein the amino acid linkers do not contain a consensus T cell epitope.
[1236] 46. The antigen binding polypeptide or antigen binding polypeptide complex of any one of clauses 1-45, wherein the Fc region comprises at least one knob-into-hole modification.
[1237] 47. The antigen binding polypeptide complex of claim 46, wherein the antigen binding polypeptide complex is an IgG1 or IgG4 antibody and the knob-into-hole modification comprises:
[1238] (i) knob substitutions of S354C and T366W and hole substitutions of Y349C, T366S, L368A and Y407V;
[1239] (ii) hole substitutions of L234A, L235A and P239A;
[1240] (iii) hole substitutions of L234A and L235A;
[1241] (iv) hole substitutions of M428L and N433S;
[1242] (v) hole substitutions of M252Y, S254T and T256E; or
[1243] (vi) a combination thereof;
[1244] based on the EU numbering scheme.
[1245] 48. The antigen binding polypeptide or antigen binding polypeptide complex of any one of clauses 1-47, wherein the antigen binding polypeptide or antigen binding polypeptide complex comprises a detectable label.
[1246] 49. The antigen binding polypeptide or antigen binding polypeptide complex of clause 48, wherein the detectable label is a radioactive label, chemiluminescent label, fluorescent label, enzyme, or peptide tag, or a combination thereof.
[1247] 50. The antigen binding polypeptide or antigen binding polypeptide complex of clause 49, wherein the peptide tag is a polyhistidine tag consisting of from about 4 to about 10 histidine residues.
[1248] 51. The antigen binding polypeptide or antigen binding polypeptide complex of clause 50, wherein the polyhistidine tag consists of about 8 histidine residues.
[1249] 52. The antigen binding polypeptide or antigen binding polypeptide complex of any one of clauses 1-51, wherein the polypeptide or polypeptide complex is conjugated to an agent as an antibody-drug conjugate (ADC).
[1250] 53. The antigen binding polypeptide or antigen binding polypeptide complex of clause 52, wherein the agent is a cytotoxic agent, immunomodulating agent, imaging agent, or therapeutic protein, or a combination thereof.
[1251] 54. The antigen binding polypeptide or antigen binding polypeptide complex of any one of clauses 1-53 that binds to an antigen with an equilibrium dissociation constant (KD) of from about 10 μM to about 1 pM; optionally wherein the antigen binding polypeptide or antigen binding polypeptide complex binds to an HIV protein with an equilibrium dissociation constant (KD) of from about 10 μM to about 1 pM.
[1252] 55. An antibody or antigen binding fragment thereof comprising the antigen binding polypeptide or antigen binding polypeptide complex of any one of clauses 1-54.
[1253] 56. The antibody or antigen binding fragment thereof of clause 55, wherein the antibody is IgG, IgM, IgE, IgA or IgD.
[1254] 57. The antibody or antigen binding fragment thereof of clause 56, wherein the IgG is IgG1, IgG2, IgG3 or IgG4.
[1255] 58. The antibody or antigen binding fragment thereof of clause 55, wherein the antigen binding fragment is a Fab, scFab, Fab′, F(ab′)2, Fv, or scFv.
[1256] 59. The antibody or antigen binding fragment thereof of clause 55, wherein the antibody is human or humanized
[1257] 60. A polynucleotide encoding the antigen binding polypeptide or antigen binding polypeptide complex of any one of clauses 1-54.
[1258] 61. The polynucleotide of clause 60, wherein the polynucleotide has at least 90% identity to any one of SEQ ID NOs:44-55, 80-97, 139-147, 634, 636, 638, 640, 642, 644, 646, 648, 650, 652, 654, 656, 658, 660, 662, 664, 666, 668, 670, 672, 674, 676, 678, and 680; optionally wherein the polynucleotide has at least 95% or 100% identity to any one of SEQ ID NOs:44-55, 80-97, 139-147, 634, 636, 638, 640, 642, 644, 646, 648, 650, 652, 654, 656, 658, 660, 662, 664, 666, 668, 670, 672, 674, 676, 678, and 680.
[1259] 62. The polynucleotide of clause 60 or clause 61, wherein the polynucleotide encodes a polypeptide having at least 90% identity to any one of SEQ ID NOs:32-43, 62-79, 130-138, 633, 635, 637, 639, 641, 643, 645, 647, 649, 651, 653, 655, 657, 659, 661, 663, 665, 667, 669, 671, 673, 675, 677, and 679, optionally wherein the polynucleotide encodes a polypeptide having at least 95% or 100% identity to any one of SEQ ID NOs:32-43, 62-79, 130-138, 633, 635, 637, 639, 641, 643, 645, 647, 649, 651, 653, 655, 657, 659, 661, 663, 665, 667, 669, 671, 673, 675, 677, and 679; or wherein the polynucleotide encodes a polypeptide having at least 90% identity to the amino acid sequence of SEQ ID Nos:32 or 33 that does not contain the eight histidine residues at the C-terminus, optionally wherein the polynucleotide encodes a polypeptide having at least 95% or 100% identity to the amino acid sequence of SEQ ID Nos:32 or 33 that does not contain the eight histidine residues at the C-terminus.
[1260] 63. The polynucleotide of clause 60, wherein the polynucleotide has at least 90% identity to any one of SEQ ID NOs:347 and 349-361, optionally wherein the polynucleotide has at least 95% identity, or 100% identity to any one of SEQ ID NOs:347 and 349-361.
[1261] 64. The polynucleotide of clause 60 or clause 63, wherein the polynucleotide encodes a polypeptide having at least 90% identity to any one of SEQ ID NOs:198-209, 346 and 348, optionally wherein the polynucleotide encodes a polypeptide having at least 95% or 100% identity to any one of SEQ ID NOs:198-209, 346 and 348.
[1262] 65. A vector comprising the polynucleotide of any one of clauses 60-64.
[1263] 66. A host cell comprising the polynucleotide of any one of clauses 60-64 or the vector of clause 65.
[1264] 67. A chimeric antigen receptor (CAR) comprising the antigen binding polypeptide or antigen binding polypeptide complex of any one of clauses 1-54.
[1265] 68. An immune cell comprising the CAR of clause 67.
[1266] 69. A pharmaceutical composition comprising (i) the antigen binding polypeptide or antigen binding polypeptide complex of any one of clauses 1-54, the antibody or antigen binding fragment thereof of any one of clauses 55-59, the polynucleotide of any one of clauses 60-64, the vector of clause 65, the host cell of clause 66, the CAR of clause 67, the immune cell of clause 68, or a combination thereof, and (ii) a pharmaceutically acceptable carrier.
[1267] 70. A kit comprising the antigen binding polypeptide or antigen binding polypeptide complex of any one of clauses 1-54, the antibody or antigen binding fragment thereof of any one of clauses 55-59, the polynucleotide of any one of clauses 60-64, the vector of clause 65, the host cell of clause 66, the CAR of clause 67, the immune cell of clause 68, or a combination thereof.
[1268] 71. An antigen binding polypeptide or antigen binding polypeptide complex according to any one of clauses 1-54, an antibody or antigen binding fragment according to any one of clauses 55-59, a polynucleotide according to any one of clauses 60-64, a vector according to clause 65, a host cell according to clause 66, a CAR according to clause 67, an immune cell according to clause 68, a pharmaceutical composition according to clause 69, or a combination thereof for use in treating or preventing a disease in a subject in need thereof.
[1269] 72. The antigen binding polypeptide, antigen binding polypeptide complex, antibody or antigen binding fragment, polynucleotide, vector, host cell, CAR, immune cell or pharmaceutical composition for use according to clause 71, wherein the disease is human immunodeficiency virus (HIV) infection, acquired immune deficiency syndrome (AIDS), AIDS-related complex (ARC), or HIV-related opportunistic infection, optionally wherein the antigen binding polypeptide or antigen binding polypeptide complex is as defined in any one of clauses 27-38.
[1270] 73. The antigen binding polypeptide, antigen binding polypeptide complex, antibody or antigen binding fragment, polynucleotide, vector, host cell, CAR, immune cell or pharmaceutical composition for use according to clause 72, wherein the disease is human immunodeficiency virus (HIV) infection caused by HIV-1.
[1271] 74. The antigen binding polypeptide, antigen binding polypeptide complex, antibody or antigen binding fragment, polynucleotide, vector, host cell, CAR, immune cell or pharmaceutical composition for use according to clause 71, wherein the disease is cancer, optionally wherein the antigen binding polypeptide or antigen binding polypeptide complex is as defined in any one of clauses 23-26.
[1272] 75. The antigen binding polypeptide, antigen binding polypeptide complex, antibody or antigen binding fragment, polynucleotide, vector, host cell, CAR, immune cell or pharmaceutical composition for use according to clause 71, wherein the disease is caused by virus infection; optionally wherein the virus is influenza virus, respiratory syncytial virus (RSV), Chlamydia, adenovirdiae, mastadeno virus, aviadenovirus, herpesviridae, herpes simplex virus 1, herpes simplex virus 2, herpes simplex virus 5, herpes simplex virus 6, leviviridae, levivirus, enterobacteria phase MS2, allolevirus, poxviridae, chordopoxvirinae, parapoxvirus, avipoxvirus, capripoxvirus, leporiipoxvirus, suipoxvirus, molluscipoxvirus, entomopoxvirinae, papovaviridae, polyomavirus, papillomavirus, paramyxoviridae, paramyxovirus, parainfluenza virus 1, mobillivirus, measles virus, rubulavirus, mumps virus, pneumonovirinae, pneumovirus, me tapneumo virus, avian pneumovirus, human metapneumovirus, picornaviridae, enterovirus, rhinovirus, hepatovirus, human hepatitis A virus, cardiovirus, andaptho virus, reoviridae, orthoreovirus, orbivirus, rotavirus, cypovirus, fijivirus, phytoreovirus, oryzavirus, retroviridae, mammalian type B retroviruses, mammalian type C retroviruses, avian type C retroviruses, type D retrovirus group, BLV-HTLV retroviruses, lentivirus, human immunodeficiency virus 1, human immunodeficiency virus 2, HTLV-I and -II viruses, SARS coronavirus, herpes simplex E virus, Epstein Barr virus, cytomegalovirus, hepatitis virus (HCV, HAV, HBV, HDV, HEV), Toxoplasma gondii virus, Treponema pallidium virus, human T-lymphotrophic virus, encephalitis virus, West Nile virus, Dengue virus, Varicella Zoster Virus, rubeola, mumps, rubella, spumavirus, flaviviridae, hepatitis C virus, hepadnaviridae, hepatitis B virus, togaviridae, alphavirus sindbis virus, rubivirus, rubella virus, rhabdoviridae, vesiculovirus, lyssavirus, ephemerovirus, cytorhabdo virus, necleorhabdo virus, arenaviridae, arenavirus, lymphocytic choriomeningitis virus, Ippy virus, lassa virus, coronaviridae, coronavirus, or torovirus.

### EXAMPLES

[1273] The following examples are provided to further illustrate aspects of the disclosure, and are not meant to constrain the disclosure to any particular application or theory of operation.

### Example 1

### Design of Bispecific and Tetraspecific Antibody Constructs

[1274] Non-limiting examples of bispecific and tetraspecific antibody configurations are shown in FIGS. 1A-1F, FIG. 8A-8C and FIGS. 16A-16D. Antibody heavy chain variable domain (VH) and light chain variable domain (VL) sequences targeting human CD3, CD28, CD38, CD19 and Her2 were selected from publicly available databases (e.g., GenBank) or patents to illustrate the feasibility of constructing exemplary bispecific and tetraspecific antibodies of the invention. Linkers of various length and sequence connecting VH and VL regions in different orders and orientations were tested, with and without different motifs of constant domains (e.g., CL, CH1, CH2, CH3). “Knob” and “hole” substitutions were integrated into respective halves of the antibody Fc region when Fc heterodimerization was needed. Effector function or half-life extension mutations can also be incorporated into Fc regions when needed. Once the amino acid sequences for each bispecific or tetraspecific antibody molecule were assembled, DNA encoding these sequences were codon optimized, synthesized (Cambridge Biologics, LLC, Brookline, Mass.), and cloned into a eukaryotic expression vector.

### Example 2

### Antibody Expression and Purification

[1275] Bispecific and tetraspecific antibodies were produced by transient transfection of 1 or 2 expression plasmids into Expi293F cells at a density of 2.5-3.0×10⁶/ml using polyethylenimine (PEI; Polyscience). Plasmid DNA and PEI were diluted in OPTi-MEM (LifeTech) separately and mixed later. The plasmid/PEI mixture, at a ratio of 1:3 (w:w), was added to the cell culture 10 minutes after mixing. Valproic acid and sodium propionate were added to final concentrations of 0.5 mM and 5 mM, respectively, 16-20 hours post transfection. Supernatant was harvested 5 days post transfection, and filtered through a 0.45 um filter. Bispecific and tetraspecific antibodies were then purified first by affinity chromatography using either nickel-charged affinity resin (Ni-NTA, if His-tagged) or Protein A (if contained Fc) in batch mode according to the manufacture's standard procedures. After antibodies were eluted by either 500 mM imidazole (if His-tagged) from Ni-NTA, or using IgG elusion buffer (Thermo Fischer Scientific) from protein A, they were dialyzed into 10 mM Histidine (pH6.0)+25 mM NaCl overnight. Antibodies were further purified by size exclusion chromatography using Hiload 16/600 Superdex 200 PG or Superdex 200 Increase 10/300 GL (Cytiva Lifesciences). Fractions with the correct elusion profile were collected and concentrated for further characterization by SD S-PAGE.

[1276] FIG. 2 shows SDS-PAGE results of Ni-NTA purified bispecific molecules with histidine tags, as depicted in FIG. 1A.

[1277] FIG. 4 shows SDS-PAGE results of protein A purified bispecific, tetravalent molecules with LALAPA Fc, as depicted in FIG. 1B.

### Example 3

### ELISA Binding Assay

[1278] An ELISA binding assay was used to test binding of bispecific and tetraspecific antibodies to their target antigens. Target protein for each binding site of bispecific and tetraspecific antibodies was coated in the wells of 96-well Immuno Plates (Thermo Fisher Scientific) overnight at 4° C. Coated plates were blocked using 5% skim milk+2% bovine serum albumin (BSA) in phosphate buffered saline (PBS)+0.25% Tween for one hour at room temperature, then washed three times with PBS+0.25% Tween 20. Serial diluted antibodies and control molecules were added to the plate and incubated at room temperature for 1 hr. Plates were washed three times with PBS+0.25% Tween 20, incubated with horseradish peroxidase (HPR) conjugated detection antibody for one hour at room temperature, washed again, and then developed with Peroxidase Substrate (KPL, Gaithersburg, Md., USA). After the reaction was terminated by adding 100 μl of KPL TMB BlueSTOP solution, plates were read at OD₆₅₀ using a plate reader and data analyzed in GraphPad Prism.

[1279] FIGS. 3A-3B show ELISA results of bispecific molecule aCD19aCD38-His or isotype control (Control IgG) binding to CD19 (FIG. 3A) and CD38 (FIG. 3B).

[1280] FIGS. 5A-5B show ELISA results of bispecific, tetravalent aCD28aCD3LALAPAFc, aCD3aCD28LALAPAFc, or isotype control (Control IgG) binding to CD3 (FIG. 5A) and CD28 (FIG. 5B).

[1281] FIGS. 7A-7B show ELISA results of bispecific aCD28aCD3LALAPAFc or aCD3aCD28LALAPAFc, or isotype control (Control IgG) binding to CD3 (FIG. 7A) and CD28 (FIG. 7B).

[1282] FIGS. 9A-9D show ELISA results of tetraspecific aCD28aCD3CD19CD38LALAPAFc, aCD3aCD28CD19CD38LALAPAFc, aCD28aCD3CD19CD38LALAPAFc, or aCD28aCD3CD38CD19LALAPAFc, or isotype control (Control IgG) binding to CD3 (FIG. 9A), CD28 (FIG. 9B), CD19 (FIG. 9C), and CD38 (FIG. 9D).

[1283] FIG. 12 shows both orientation and linker can affect expression of tetraspecific molecules.

[1284] FIGS. 13A-13D show ELISA results of tetraspecific aCD28aCD3CD19CD38LALAPAFc with different linker lengths as depicted in FIG. 12, or isotype control (Control IgG) binding to CD3 (FIG. 13A), CD28 (FIG. 13B), CD19 (FIG. 13C), and CD38 (FIG. 13D).

[1285] FIGS. 14A-14D show ELISA results of tetraspecific aCD28aCD3CH1/CD19CD38CL LALAPAFc with different linkers as depicted in FIG. 8B, or isotype control (Control IgG) binding to CD3 (FIG. 14A), CD28 (FIG. 14B), CD38 (FIG. 14C), and CD19 (FIG. 14D).

[1286] FIGS. 15A-15D show ELISA results of tetraspecific aCD28aCD3CD38CD19LALAPAFc, aCD28aCD3CD38CD19LALAPAFc, aCD28aCD3CD38CD19LALAPAFc, or aCD3aCD28CD19CD38LALAPAFc, or isotype control (Control IgG) binding to CD3 (FIG. 15A), CD28 (FIG. 15B), CD38 (FIG. 15C), and CD19 (FIG. 15D).

[1287] FIGS. 15E-15H show ELISA results of tetraspecific aCD28aCD3L1/aCD38aCD19L1HHLL, aCD28aCD3L1/aCD19aCD38L1_HHLL, aCD3aCD28L1/aCD38aCD19L1_HHLL, aCD3aCD28L1/aCD19aCD38L1_HHLL, or isotype control (Control HuIgG) binding to CD3 (FIG. 15E), CD28 (FIG. 15F), CD38 (FIG. 15G), and CD19 (FIG. 15H).

### Example 4

### T Cell Activation Assay

[1288] T cell activation by bispecific and tetraspecific antibodies was tested using an in vitro T cell activation assay. Purified human peripheral blood mononuclear cells (PBMCs, Blood Research Component, Brookline, Mass., USA) were resuspended in culture medium (RPMI1640 with 10% FBS and supplemented with Penicillin Streptomycin)(Gibco) (2.5×10⁵ cells/ml). Serial diluted bispecific, tetraspecific and control antibodies were first coated onto 96-well flat-bottom culture plates by incubating 2-4 hours in a 37° C. tissue culture incubator. PBMCs (200 μL) were then added to each well containing the antibodies and incubated for 16-24 hours in a 37° C. tissue culture incubator. The cells were centrifuged, stained with fluorescent labeled antibodies for T cell markers, such as CD3, CD4, CD8, activation marker CD69, and analyzed by an Attune flow cytometer (Thermo Fisher Scientific, USA). Data were analyzed using FlowJo software.

[1289] FIGS. 11A-11B show activation (CD69+) by tetraspecific molecules aCD28aCD3/aCD19CD38L1LALAPAFc or aCD3aCD28/CD19CD38L1LALAPAFc, or anti-CD3 mAb, of CD4+(FIG. 11A) or CD8+(FIG. 11B) T cells from three different donors.

### Example 5

### NFkB Luciferase Reporter Assay

[1290] The function of bispecific and tetraspecific antibody constructs was further analyzed using a nuclear factor kappa B (NFkB) luciferase reporter assay. For this assay, Luciferase Reporter Jurkat Stable Cell Line (Signosis, Calif., USA) and Jurkat-Lucia™ NFAT Cells (InvivoGen, Calif., USA) were prepared according to manufacturer's protocol. Briefly, cells were thawed for 2 min in a 37° C. water bath and gently transferred to a 15 mL conical centrifuge tube containing 10 mL pre-warmed R10 media. Cells were pelleted at 300 g for 5 min at room temperature. After removing the supernatant, cells were resuspended in 20 mL pre-warmed culture media and transferred to a 75 cm² culture flask, followed by incubation in a mammalian tissue culture incubator until cells were growing and stable (“3-4 days). Cells were maintained in culture media+selective antibiotics and normally used 7 days after thawing.

[1291] For antibody stimulation, bispecific, tetraspecific or control antibodies were serially diluted in PBS and coated onto 96-well flat-bottom culture plates by incubating 2-4 hours in a 37° C. tissue culture incubator. NFkB Luciferase Reporter Jurkat Stable Cells were resuspended to 2×10⁶ cells/mL, with 100 μl of cells added to each well containing the antibodies and incubated in a mammalian incubator for 24 hours. Assay plates were then taken out and allowed to equilibrate to ambient temperature (10-15 min). Bio-Glo™ Reagent (Promega Cat #G7941) (ambient temperature) was added at 50 μl for each well of the assay plate. After 5 minutes, luminescence activity was measured using Varioskan microplate reader (Thermo Fisher). Data were plotted using GraphPad Prism software. Jurkat-Lucia™ NFAT Cells were resuspended to 7.5×10⁵ cells/mL, with 200 μl of cells added to each well containing the antibodies and incubated in a mammalian incubator for 24 hours. 20 uL of the cell culture supernatant was pipetted into a new 96-well white-walled microtiter plate. 50 uL of Quanti-Luc solution (InvivoGen) was then added to each well before luminescence activity was measured using Varioskan microplate reader (Thermo Fisher). Data were plotted using GraphPad Prism software.

[1292] FIG. 6 shows NFKB pathway activation by bispecific, tetravalent aCD28aCD3L1LALAPAFc or aCD3aCD28L1LALAPAFc.

[1293] FIG. 10 shows NFKB pathway activation by tetraspecific aCD28aCD3/aCD19CD38L1LALAPAFc or aCD3aCD28/CD19CD38L1LALAPAFc.

### Example 6

### Design of Trispecific Antibody Constructs

[1294] Non-limiting examples of additional trispecific antibody configurations are shown in FIGS. 17A-17E. Such examples include, but are not limited to, an antigen binding polypeptide complex comprising a first polypeptide having an amino acid sequence of SEQ ID NOs:148-166, 180 or 181, and a second polypeptide having an amino acid sequence of SEQ ID NOs:167-179.

[1295] Antibody heavy chain variable domain (VH) and light chain variable domain (VL) sequences targeting human CD3, CD28, CD38 and CD19 were selected from publicly available databases (e.g., GenBank) or patents to illustrate the feasibility of constructing various formats of trispecific antibodies. Linkers in various length and sequence connecting VH and VL regions in different orders and orientations were tested, with and without different motifs of the constant domains (e.g., CL, CH1, CH2, CH3). “Knob” and “hole” mutations were integrated into respective halves of the antibody Fc region when Fc heterodimerization was needed. Effector function or half-life extension mutations can also be incorporated into the Fc sequences when needed. Once the amino acid sequences for each trispecific antibody molecule were assembled, DNA encoding these sequences were codon optimized, synthesized (Cambridge Biologics, LLC, Brookline, Mass.), and cloned into a eukaryotic expression vector.

### Example 7

### Trispecific Antibody Expression and Purification

[1296] Trispecific antibodies were produced by transient transfection of expression plasmids into Expi293F cells at density of 2.5-3.0×10⁶/ml using polyethylenimine (PEI; Poly science). Plasmid DNA and PEI were diluted in OPTi-MEM (LifeTech) separately and mixed later. The plasmid/PEI mixture, at a ratio of 1:3 (w:w), was added to the cell culture 10 minutes after mixing. Valproic acid and sodium propionate were added to final concentrations of 0.5 mM and 5 mM, respectively, 16-20 hours post transfection. Supernatant was harvested 5 days post transfection, and filtered through a 0.45 um filter. Trispecific antibodies were then purified first by affinity chromatography using Protein A resins in batch mode according to manufacturer's standard procedures. After antibodies were eluted using IgG elusion buffer (Thermo Fischer Scientific) from protein A, they were dialyzed into 10 mM Histidine (pH6.0)+25 mM NaCl overnight. Antibodies were further purified by size exclusion chromatography using Hiload 16/600 Superdex 200 PG or Superdex 200 Increase 10/300 GL (Cytiva Lifesciences). Fractions with the correct elusion profile were collected and concentrated for further characterization.

### Example 8

### Trispecific Antibody ELISA Binding Analysis

[1297] An ELISA binding assay was used to test binding of trispecific antibodies to their target antigens. Target protein for each binding site of the trispecific antibodies was coated in the wells of 96-well Immuno Plates (Thermo Fisher Scientific) overnight at 4° C. Coated plates were blocked using 5% skim milk+2% bovine serum albumin (BSA) in phosphate buffered saline (PBS)+0.25% Tween for one hour at room temperature, then washed three times with PBS+0.25% Tween 20. Serial diluted trispecific antibodies and control molecules were added to the plates and incubated at room temperature for 1 hr. Plates were washed three times with PBS+0.25% Tween 20, incubated with horseradish peroxidase (HPR) conjugated detection antibody for one hour at room temperature, washed again, and then developed with Peroxidase Substrate (KPL, Gaithersburg, Md., USA). After the reaction was terminated by adding 100 μl of KPL TMB BlueSTOP solution, plates were read at OD₆₅₀ using a plate reader and data analyzed in GraphPad Prism.

[1298] FIGS. 18A-18C show ELISA results of trispecific aCD28aCD3/aCD38scFv, aCD28aCD3/aCD38Fab, aCD28aCD3/aCD38scFab, aCD28aCD3/aCD38CLCH1, or isotype control (Control IgG) binding to CD3 (FIG. 18A), CD28 (FIG. 18B), and CD38 (FIG. 18C).

[1299] FIGS. 21A-21D show ELISA results of trispecific aCD28aCD3CL1CH1/aCD38scFvCL, aCD28aCD3CL1CH1/aCD19scFvCL or isotype control (Control IgG) binding to CD3 (FIG. 21A), CD28 (FIG. 21B), CD19 (FIG. 21C), and CD38 (FIG. 21D).

### Example 9

### T Cell Activation Assay

[1300] T cell activation by trispecific antibodies was tested using an in vitro T cell activation assay. Purified human peripheral blood mononuclear cells (PBMCs, Blood Research Component, Brookline, Mass., USA) were resuspended in culture medium (RPMI1640 with 10% fetal bovine serum (FBS) and supplemented with Penicillin Streptomycin) (Gibco) (2.5×10⁵ cells/ml). Serial diluted trispecific and control antibodies were first coated onto 96-well flat-bottom culture plates by incubating 2-4 hours in a 37° C. tissue culture incubator. PBMCs (200 μL) were then added to each well containing the antibodies and incubated for 16-24 hours in a 37° C. tissue culture incubator. The cells were centrifuged, stained with fluorescent labeled antibodies for T cell markers, such as CD3, CD4, CD8, activation marker CD69, and analyzed by an Attune flow cytometer (Thermo Fisher Scientific, USA). Data were analyzed using FlowJo software.

[1301] FIG. 19 shows the activation (CD69+) by trispecific antibodies aCD28aCD3L1/aCD38scFv, aCD3aCD28/aCD38scFv, aCD28aCD3/aCD38scFab, aCD3aCD28/aCD38scFab, PMA/IO positive or negative isotype (Control IgG) control, of CD2+ T cells from three different donors.

### Example 10

### In Vitro Cytolytic Assay

[1302] Cytolysis of lymphoma tumor cells Z-138 by T cells mediated by trispecific antibodies was determined using an in vitro cytolytic assay. PBMCs were isolated from normal human donors by Ficoll separation. Target lymphoma cancer cells Z-138 were labeled with the membrane dye PKH-26 (Sigma-Aldrich) and co-cultured for 16 h in a 37° C. tissue culture incubator with human PBMCs as effector cells at an effector-to-target (E:T) ratio of 10:1. Titrations of trispecific antibodies were added to the cells at the start of the incubation. After the incubation cells were spun down and then stained with Fixable Viability dye (Invitrogen). Cells were washed and then run on an Attune flow cytometer (Thermo Fisher Scientific, USA), followed by analysis using the FlowJo software. The percentage of killing is calculated by gating on PKH-26+ tumor cells and determining percentage of dying cells that stain positive for Fixable Viability dye.

[1303] FIGS. 20A-20C show cytolysis of lymphoma tumor cells by T cells mediated by trispecific antibodies aCD28aCD3L1/aCD38scFv, aCD3aCD28/aCD38scFv, aCD28aCD3/aCD38scFab, aCD3aCD28/aCD38scFab, PMA/IO or isotype (Control IgG) control from three different donors (FIGS. 20A-20C, respectively).

### Example 11

### Design of Trispecific Antibody Constructs

[1304] Non-limiting examples of multispecific antibody configurations are shown in FIG. 22. Such examples include, but are not limited to, an antigen binding polypeptide complex comprising a first polypeptide having an amino acid sequence of SEQ ID NOs:182-195, and a second polypeptide having an amino acid sequence of SEQ ID NOs:196 or 197.

[1305] Antibody heavy chain variable domains (VH) and light chain variable domains (VL) targeting human CD3, CD19, CD20, CD28 and CD38 were selected from publicly available databases (e.g., GenBank) or patents to illustrate the feasibility of constructing various formats of trispecific antibodies. Linkers in various length and sequence connecting VH and VL regions in different orders and orientations were tested, with and without different motifs of the constant domains (e.g., CL, CH1, CH2, CH3). “Knob” and “hole” mutations were integrated into respective halves of the antibody Fc region when Fc heterodimerization was needed. Effector function or half-life extension mutations can also be incorporated into the Fc sequences when needed. Once the amino acid sequences for each multispecific antibody molecule were assembled, DNA encoding these sequences was codon optimized, synthesized (Cambridge Biologics, LLC, Brookline, Mass.), and cloned into a eukaryotic expression vector.

### Example 12

### Multispecific Antibody Expression and Purification

[1306] Multispecific antibodies were produced by transient transfection of expression plasmids into Expi293F cells at density of 2.5-3.0×10⁶/ml using polyethylenimine (PEI; Poly science). Plasmid DNA and PEI were diluted in OPTi-MEM (LifeTech) separately and mixed later. The plasmid/PEI mixture, at a ratio of 1:3 (w:w), was added to the cell culture 10 minutes after mixing. Valproic acid and sodium propionate were added to final concentrations of 0.5 mM and 5 mM, respectively, 16-20 hours post transfection. Supernatant was harvested 5 days post transfection, and filtered through a 0.45 um filter. Multispecific antibodies were then purified first by affinity chromatography using Protein A resins in batch mode according to the manufacture's standard procedures. After antibodies were eluted using IgG elusion buffer (Thermo Fischer Scientific) from protein A, they were dialyzed into 10 mM Histidine (pH6.0)+25 mM NaCl overnight Antibodies were further purified by size exclusion chromatography using Hiload 16/600 Superdex 200 PG or Superdex 200 Increase 10/300 GL (Cytiva Lifesciences). Fractions with the correct elusion profile were collected and concentrated for further characterization.

### Example 13

### Multispecific Antibody ELISA Binding Analysis

[1307] An ELISA binding assay was used to test binding of multispecific antibodies to their target antigens. Target protein for each binding site of the multispecific antibodies was coated in the wells of 96-well Immuno Plates (Thermo Fisher Scientific) overnight at 4° C. Coated plates were blocked using 5% skim milk+2% bovine serum albumin (BSA) in phosphate buffered saline (PBS)+0.25% Tween for one hour at room temperature, then washed three times with PBS+0.25% Tween 20. Serial diluted multispecific antibodies and control molecules were added to the plate and incubated at room temperature for 1 hr. Plates were washed three times with PBS+0.25% Tween 20, incubated with horseradish peroxidase (HPR) conjugated detection antibody for one hour at room temperature, washed again, and then developed with Peroxidase Substrate (KPL, Gaithersburg, Md., USA). After the reaction was terminated by adding 100 μl of KPL TMB BlueSTOP solution, the plate was read at OD₆₅₀ using a plate reader and data analyzed in GraphPad Prism.

[1308] FIGS. 23A-23D show ELISA results of tetraspecific aCD28aCD3LHaCD38/aCD19aCD20, aCD28aCD3LHaCD38/aCD20aCD19, aCD28aCD3HLaCD38/aCD19aCD20, aCD28aCD3HLaCD38/aCD20aCD19, or isotype control (Control IgG) binding to CD3 (FIG. 23A), CD28 (FIG. 23B), CD38 (FIG. 23C), and CD19 (FIG. 23D).

### Example 14

### Design of Additional Antibody Constructs

[1309] Non-limiting examples of additional antibody configurations are shown in FIG. 24. Such examples include, but are not limited to, an antigen binding polypeptide complex comprising a first polypeptide having an amino acid sequence of any one of SEQ ID NOs:198-209, and a second polypeptide having an amino acid sequence of any one of SEQ ID NOs:198-209.

### Example 15

### Design of Masked Multispecific Molecules

[1310] Non-limiting examples of masked tetraspecific antibody configurations are shown in FIGS. 25-26 and 31. Such examples include, but are not limited to, an antigen binding polypeptide complex comprising two or three polypeptides, each having the sequence of any one of SEQ ID NOs:210-326. In FIG. 25, variable domains (Fv) of the antibody are shown as heavy chain/light chain pairs, with Fv1-Fv3 targeting tumor associated antigens (TAAs) or immune costimulatory receptors, and a fourth Fv targeting CD3 (aCD3 or aCD3). In some aspects, linkers between Fv3 and aCD3 contain one or more protease recognition sites. In some aspects, three of the Fvs target human Trop2 (aTROP2), cMet (acMET), and CD28 (aCD28) and a fourth Fv targets CD3. See FIGS. 26 and 31.

[1311] Antibody heavy chain variable domain (VH) and light chain variable domain (VL) sequences targeting human CD3, CD28, Trop2, and cMet were selected from publicly available databases (e.g., GenBank) or patents to illustrate the feasibility of constructing various formats of trispecific antibodies. Linkers in various length and sequence connecting VH and VL regions in different orders and orientations were tested, with and without different motifs of the constant domains (e.g., CL, CH1, CH2, CH3). “Knob” and “hole” mutations were integrated into respective halves of the antibody Fc region when Fc heterodimerization was needed. Effector function or half-life extension mutations can also be incorporated into the Fc sequences when needed. Once the amino acid sequences for each trispecific antibody molecule were assembled, DNA encoding these sequences were codon optimized, synthesized (Cambridge Biologics, LLC, Brookline, Mass.), and cloned into a eukaryotic expression vector.

### Example 16

### Expression and Purification of Masked and Non-Masked Multispecific Molecules

[1312] Masked and non-masked antibodies were produced by transient transfection of expression plasmids into Expi293F cells at density of 2.5-3.0×10⁶ per ml using PEI (Polyscience). Plasmid DNA and PEI were diluted in OPTi-MEM (LifeTech) separately and mixed later. The plasmid/PEI mixture, at a ratio of 1:3 (w:w), was added to the cell culture 10 minutes after mixing. Valproic acid and sodium propionate were added to final concentrations of 0.5 mM and 5 mM, respectively, 16-20 hours post transfection. Supernatant was harvested 5 days post transfection, and filtered through a 0.45 μm filter. Multispecific antibodies were then purified first by affinity chromatography using Protein A resins in batch mode according to manufacture's standard procedures. After antibodies were eluted using IgG elusion buffer (Thermo Fischer Scientific) from protein A, they were dialyzed into 10 mM Histidine (pH6.0)+25 mM NaCl overnight Antibodies were further purified by size exclusion chromatography using Hiload 16/600 Superdex 200 PG or Superdex 200 Increase 10/300 GL (Cytiva Lifesciences). Fractions with the correct elusion profile were collected and concentrated for further characterization.

### Example 17

### In Vitro Protease Treatment of Masked Multispecific Molecules

[1313] Purified masked multispecific molecules at 1 μg/ml were incubated with 0.2 μg/ml activated Matriptase (MTP) (R & D systems, Cat #3946-SEB) or 0.4 μg/ml MMP9 (R & D system, Cat #911_MP) at 37° C. for 4 hours. 2 μg of digested proteins were run on SDS-PAGE.

[1314] FIG. 26 shows SDS-PAGE results of in vitro cleavage of exemplary masked tetraspecific molecules as depicted. Molecules were treated with either MTP or MMP9 protease as specified. GS:non-cleavable linker sequences are on both light chain (LC) and heavy chain (HC). LC_mmp:MMP2 sensitive linker sequences are on LC, and non-cleavable linker sequences are on HC. HC_mtp:MTP sensitive linker sequences are on HC, and non-cleavable linker sequences are on LC.

### Example 18

### ELISA Binding Analysis of Masked and Non-Masked Multispecific Molecules

[1315] An ELISA binding assay was used to test binding of multispecific molecules to their target antigens. Target protein for each binding site of the multispecific molecules was coated in the wells of 96-well Immuno Plate (Thermo Fisher Scientific) overnight at 4° C. Coated plates were blocked using 5% skim milk+2% BSA in PBS+0.25% Tween for one hour at room temperature, then washed with PBS+0.25% Tween 20 for three times. Serial diluted multispecific molecules and control molecules were added to the plate and incubated at room temperature for 1 hour. Plates were washed three times with PBS+0.25% Tween 20, incubated with HPR conjugated detection antibody for one hour at room temperature, washed again, and then developed with Peroxidase Substrate (KPL, Gaithersburg, Md., USA). After the reaction was terminated by adding 100 μl of KPL TMB BlueSTOP solution, the plate was read at OD₆₅₀ using a plate reader and data analyzed in GraphPad Prism.

[1316] FIG. 27 shows ELISA binding results of exemplary masked tetraspecific molecules as depicted in FIG. 26, or negative isotype (Control IgG1), with or without protease treatment. Molecules cleaved or not cleaved by MTP or MMP9 as specified were tested for binding affinity to Trop2 and cMet. Affinities to these two targets were not affected by protease treatment.

[1317] FIG. 28 shows ELISA binding results of exemplary masked tetraspecific molecules as depicted in FIG. 26, or negative isotype (Control IgG1), with or without protease treatment. Molecules cleaved or not cleaved by MTP or MMP9 as specified were tested for binding affinity to CD28. Affinities to these two targets were not affected by protease treatment.

[1318] FIG. 29 shows ELISA binding results of exemplary masked tetraspecific molecules as depicted in FIG. 26, or negative isotype (Control IgG1), with or without protease treatment. Molecules cleaved or not cleaved by MTP or MMP9 as specified were tested for binding affinity to CD3.

[1319] FIG. 31 shows ELISA binding results of exemplary non-masked tetraspecific molecules as depicted, or negative isotype (hIgG1LALPA) control, to their respective targets of hTrop2, hcMet, hCD28, and hCD3.

### Example 19

### T Cell Activation Assay

[1320] T cell activation by multispecific molecules was tested using an in vitro T cell activation assay. Purified human PBMCs (Blood Research Component, Brookline, Mass., USA) were resuspended in culture medium (RPMI1640 with 10% FBS and supplemented with Penicillin Streptomycin)(Gibco) (2.5×10⁵ cells/ml). Serial diluted multispecific and control molecules were first coated onto 96-well flat-bottom culture plates by incubating for 2-4 hours in a 37° C. tissue culture incubator. PBMCs (200 μL) were then added to each well containing the molecules and incubated for 16-24 hours in a 37° C. tissue culture incubator. The cells were spun down, stained with florescent labeled antibodies for T cell activation marker CD69, and analyzed by an Attune flow cytometer (Thermo Fisher Scientific, USA). Data was analyzed using FlowJo software.

[1321] FIG. 32 shows CD69+ activation by exemplary non-masked tetraspecific molecules, or negative isotype (IgG1LALPA) control, of CD2+ T cells from PBMCs of two different donors.

### Example 20

### In Vitro Cytolytic Assay

[1322] Cytolysis of lymphoma tumor cells Z-138 by T cells mediated by trispecific antibodies was determined using an in vitro cytolytic assay. PBMCs were isolated from normal human donors by Ficoll separation. In vitro cytotoxicity assay was real-time monitored of cellular phenotypic changes by measurement of electrical impedance using the Agilent×CELLigence RTCA MP system. The system measures impedance using interdigitated microelectrodes integrated into the bottom of each well of the tissue culture E-Plates 96. Briefly, tumor cell HCC1954 were seeded into an E-plate 96 as target cells (T) at 20K/well culture at 37° C. for overnight, followed by the addition of human PBMC cells as immune effector cells (E) at 200K/well, in the presence of the 5-fold serially diluted multispecific antibody or human IgG1 isotype control. Cell impedance (measured as the cell index) was normalized when the effector cells were added and monitored continuously every 30 min for a duration of up to 160 hours. The cytotoxicity was calculated as Lysis %=100−(experimental normalized cell index/average of control antibody group normalized cell index at same concentration)×100.

[1323] FIG. 30 shows cytolysis of HCC1954 tumor cells by PBMCs (E:T:10:1) mediated by exemplary masked tetraspecific molecules as depicted in FIG. 26, or negative isotype (Control IgG1), from PBMCs of two donors (KP63250 and KP63251).

### Example 21

### Design of Additional Antibody Constructs

[1324] A further non-limiting example of an additional antibody configuration is shown in FIG. 33. Variable domains (Fv) of the antibody are shown as heavy chain/light chain pairs, along with Fc domain. Also shown (TNF) is a trimer of extracellular domains of a tumor necrosis factor superfamily (TNFSF) ligand (e.g., 4-1BBL or OX-40L). TNF can be present on both arms of the antibody (shown in FIG. 33) or present on one arm and not the other. This example includes, but is not limited to, an antigen binding polypeptide complex comprising a first polypeptide having an amino acid sequence of any one of SEQ ID NOs:327-337, and a second polypeptide having an amino acid sequence of any one of SEQ ID NOs:327-337.

### Example 22

### BLI and Flow Cytometry Analysis of Additional Antibody Constructs

[1325] A further non-limiting example of an tetravalent, bispecific antibody configuration is shown in FIG. 34A, called MX846 (SEQ ID NOs:633-636). Other examples that were made include MX847 (SEQ ID NOs:637-640), MX850 (SEQ ID NOs:641-644), MX852 (SEQ ID NOs:649-652), and MX854 (SEQ ID NO:657-660). MX846 was analyzed for binding to CD3 by biolayer interferometry (BLI) (FIG. 34B), and to CD20 by flow cytometry (FIG. 34C) as follows.

### Binding Kinetic Analyses by Biolayer Interferometry

[1326] On the Octet® R8 (Sartorius), recombinant His-tagged CD3, BMCA, or CD28 was loaded by His-tag capture onto HIS1K biosensors (100 nM ligand, 300 seconds, 1000 RPM). After baseline step (100 seconds, 1000 RPM), association with each test molecule as indicated (100 nM analyte) was monitored (300 seconds, 1000 RPM). Dissociation was then monitored (300 seconds, 1000 RPM).

[1327] All assay steps occurred in 1×kinetic buffer (1×PBS pH 7.4; 0.1% BSA; 0.02% Tween-20) at 24 degrees. Prior to each kinetic cycle, the HIS1K biosensors were regenerated in 1.5 pH glycine (5 seconds, 1000 RPM) and neutralized in 1×kinetic buffer (5 seconds, 1000 RPM) 5 consecutive times and then equilibrated back to 1×kinetic buffer (100 seconds; 1000 RPM).

[1328] Binding model fit assumed a 1:1 binding model and fit the association and dissociation together. Baseline was determined by mean of last five seconds of baseline step.

### In Vitro Cell Surface Binding by Flow Cytometry

[1329] Expi293 cells transfected hCD20 were seeded in 96 U-bottom plate at 1×10e5 cells/well. The TASER antibody or human IgG1 isotype control were added at final concentration 1-10 μg/ml and incubated on ice or at 4° C. for 20-30 minutes. Then, cells were spun down and stained with anti-human Fc PE (Jackson Immuno Research Cat #109-115-098) and viability dye (Invitrogen Cat #65-0864-14). Stained cells were analyzed by flow cytometry and the binding ability were presented as PE positive population among total live cells.

[1330] The results in FIGS. 34B and 34C show that MX846 bound to CD3 and CD20.

### Example 23

### BLI and Flow Cytometry Analysis of Additional Antibody Constructs

[1331] A further non-limiting example of a tetravalent, trispecific antibody configuration is shown in FIG. 35A, called MX855 (SEQ ID NOs:661-664). MX855 was analyzed for binding to CD3 and CD28 by biolayer interferometry (BLI) (FIG. 35B), and to CD20 by flow cytometry (FIG. 35C), using the methods explained above. The results in FIGS. 35B and 35C show that MX855 bound to CD3, CD28 and CD20.

### Example 24

### BLI and Flow Cytometry Analysis of Additional Antibody Constructs

[1332] A further non-limiting example of a tetraspecific antibody configuration is shown in FIG. 36A, called MX851 (SEQ ID NOs:645-648). MX851 was analyzed for binding to CD3, CD28 and BCMA by biolayer interferometry (BLI) (FIG. 36B), and to CD20 by flow cytometry (FIG. 36C), using the methods explained above. The results in FIGS. 36B and 36C show that MX851 bound to CD3, CD28, BCMA and CD20.

### Example 25

### BLI and Flow Cytometry Analysis of Additional Antibody Constructs

[1333] A further non-limiting example of a tetraspecific antibody configuration is shown in FIG. 37A, called MX853 (SEQ ID NOs:653-656). MX853 was analyzed for binding to CD3, CD28 and BCMA by biolayer interferometry (BLI) (FIG. 37B), and to CD20 by flow cytometry (FIG. 37C), using the methods explained above. The results in FIGS. 37B and 37C show that MX853 bound to CD3, CD28, BCMA and CD20.

### Example 26

### Killing of Mantle Cell Lymphoma with Additional Antibody Constructs

[1334] In vitro killing of Z-138 tumor cells by T cells mediated by tetravalent, tetraspecific MX851 and tetravalent, trispecific MX855 was analyzed. B-lymphoma Z-138 was pre-labeled with PKH26 (Sigma Cat #PKH26GL-1KT) and seeded into a 96-well U-bottom plate as target cells (T) at 20K/well), in the presence of the 5-fold serially diluted TASER antibody or human IgG1 isotype control (hIgG1LALAPA). Human Pan-T cells isolated from healthy donor PBMC with Dynabeads® Untouched™ Human T Cells kit (Invitrogen Cat #11344D) were added as immune effector cells (E) at 60K/well (E:T=3:1) and incubated at 37° C. for 24-48 hours. The cells were spun down and stained with Viability Dye eFluor™ 660 (Invitrogen Cat #65-0864-14) after incubation. Stained cells were analyzed by flow cytometry for live cell counts. The cytotoxicity was calculated as Lysis %=100-(experimental live cell number/average of control antibody group live cell number at same concentration)*100.

[1335] The results in FIGS. 38A-38B show that both MX851 (FIG. 38A) and MX855 (FIG. 38B) mediated killing of Z-138 tumor cells.

### Example 27

### BLI Analysis of Additional Antibody Constructs

[1336] A further non-limiting example of a trispecific antibody configuration is shown in FIG. 39A, called MX894 (SEQ ID NOs:665-668; VRC01scFv/PGT121×10e8v4L1IgG1LS). MX894 was analyzed for binding to 10e8 fusion peptide, and CD4 site-dependent and CD4 site-independent HIV spike protein by biolayer interferometry (BLI) as follows.

### Binding Kinetic Analyses by Biolayer Interferometry

[1337] On the Octet® R8 (Sartorius), recombinant His-tagged HIV RCS3, HIV gp140ACD4, or HIV 10e8 peptide was loaded by His-tag capture onto HIS1K biosensors (100 nM ligand, 300 seconds, 1000 RPM). After baseline step (100 seconds, 1000 RPM), association with each test molecule as indicated (100 nM analyte) was monitored (300 seconds, 1000 RPM). Dissociation was then monitored (300 seconds, 1000 RPM).

[1338] All assay steps occurred in 1× kinetic buffer (1×PBS pH 7.4; 0.1% BSA; 0.02% Tween-20) at 24 degrees C. Prior to each kinetic cycle, the HIS1K biosensors were regenerated in 1.5 pH glycine (5 seconds, 1000 RPM) and neutralized in 1×kinetic buffer (5 seconds, 1000 RPM) 5 consecutive times and then equilibrated back to 1×kinetic buffer (100 seconds; 1000 RPM).

[1339] Binding model fit assumed a 1:1 binding model and fit the association and dissociation together. Baseline was determined by mean of last five seconds of baseline step.

[1340] The results in FIGS. 39B-39D show that MX894 bound to 10e8 fusion peptide (FIG. 39B), and CD4 site-dependent (FIG. 39C) and CD4 site-independent (FIG. 39D) HIV spike protein.

### Example 28

### BLI Analysis of Additional Antibody Constructs

[1341] A further non-limiting example of a tetraspecific antibody configuration is shown in FIG. 40A, called MX873 (SEQ ID NOs:669-672; VRC26.25×10-1074L9/VRC01×PGT121L1 IgG1LS). MX873 was analyzed for binding to CD4 site-dependent and CD4 site-independent HIV spike protein by biolayer interferometry (BLI) as described above.

[1342] The results in FIGS. 40B-40C show that MX873 bound to CD4 site-dependent (FIG. 40B) and CD4 site-independent (FIG. 40C) HIV spike protein.

### Example 29

### BLI Analysis of Additional Antibody Constructs

[1343] A further non-limiting example of a tetraspecific antibody configuration is shown in FIG. 41A, called MX875 (SEQ ID NOs:673-676; 10-1074×VRC26.25L9/VRC01×PGT121L1 IgG1LS). MX875 was analyzed for binding to CD4 site-dependent and CD4 site-independent HIV spike protein by biolayer interferometry (BLI) as described above.

[1344] The results in FIGS. 41B-41C show that MX875 bound to CD4 site-dependent (FIG. 41B) and CD4 site-independent (FIG. 41C) HIV spike protein.

### Example 30

### BLI Analysis of Additional Antibody Constructs

[1345] A further non-limiting example of a tetraspecific antibody configuration is shown in FIG. 42A, called MX877 (SEQ ID NOs:677-680; STAR_VRC26.25×PGT128L9/STAR_VRC01×PGT121L1 IgG1LS). MX877 was analyzed for binding to CD4 site-dependent and CD4 site-independent HIV spike protein by biolayer interferometry (BLI) as described above.

[1346] The results in FIGS. 42B-42C show that MX877 bound to CD4 site-dependent (FIG. 42B) and CD4 site-independent (FIG. 42C) HIV spike protein.

[1347] All publications, patents and patent applications mentioned in this application are herein incorporated in their entirety by reference into the specification, to the same extent as if each individual publication, patent or patent application was specifically and individually indicated to be incorporated herein by reference. In addition, citation or identification of any reference in this application shall not be construed as an admission that such reference is available as prior art to the present invention. To the extent that section headings are used, they should not be construed as necessarily limiting.

The application's sequence listing, which the Patent Office published only in electronic form, follows.

SEQUENCE LISTING (688 sequences)

SEQ ID NO: 1 - protein, 5 aa, synthetic construct
  REGION 1..5: note = Artificial Sequence
GGSSG

SEQ ID NO: 2 - protein, 5 aa, synthetic construct
  REGION 1..5: note = Artificial Sequence
GSSGS

SEQ ID NO: 3 - protein, 5 aa, synthetic construct
  REGION 1..5: note = Artificial Sequence
GTVAA

SEQ ID NO: 4 - protein, 5 aa, synthetic construct
  REGION 1..5: note = Artificial Sequence
ASGGS

SEQ ID NO: 5 - protein, 5 aa, synthetic construct
  REGION 1..5: note = Artificial Sequence
ASTGG

SEQ ID NO: 6 - protein, 6 aa, synthetic construct
  REGION 1..6: note = Artificial Sequence
ASGGSG

SEQ ID NO: 7 - protein, 10 aa, synthetic construct
  REGION 1..10: note = Artificial Sequence
GGSGGSSGSS

SEQ ID NO: 8 - protein, 10 aa, synthetic construct
  REGION 1..10: note = Artificial Sequence
SGGSGSSGGS

SEQ ID NO: 9 - protein, 17 aa, synthetic construct
  REGION 1..17: note = Artificial Sequence
GGSGGSGSGGGSASGSG

SEQ ID NO: 10 - protein, 18 aa, synthetic construct
  REGION 1..18: note = Artificial Sequence
GGSGGSGSGGGGSASGSG

SEQ ID NO: 11 - protein, 20 aa, synthetic construct
  REGION 1..20: note = Artificial Sequence
GGGSSGGGGSGGSGSGGSGS

SEQ ID NO: 12 - protein, 20 aa, synthetic construct
  REGION 1..20: note = Artificial Sequence
GGGGSGGSGSGGGGSASGSG

SEQ ID NO: 13 - protein, 20 aa, synthetic construct
  REGION 1..20: note = Artificial Sequence
GGGSSGGSGSGGSGSGGSGS

SEQ ID NO: 14 - protein, 22 aa, synthetic construct
  REGION 1..22: note = Artificial Sequence
SGGSSGGSGSGGSGSGGSGSSG

SEQ ID NO: 15 - protein, 22 aa, synthetic construct
  REGION 1..22: note = Artificial Sequence
GSGSSGGGGSGGSGSGGSGSSG

SEQ ID NO: 16 - protein, 40 aa, synthetic construct
  REGION 1..40: note = Artificial Sequence
GGGGSGSGGSGGGSSGGGGSGGGGSGGGGSGGGGSGGGGS

SEQ ID NO: 17 - protein, 40 aa, synthetic construct
  REGION 1..40: note = Artificial Sequence
GGGGSGGGGSGGGGSGGGGSGGGGSGGGGSGGGGSGGGGS

SEQ ID NO: 18 - protein, 43 aa, synthetic construct
  REGION 1..43: note = Artificial Sequence
GGGGSGSGGSGGGSSGGGGSGGGGSGGGGSGGGGSGGGGSSSS

SEQ ID NO: 19 - protein, 45 aa, synthetic construct
  REGION 1..45: note = Artificial Sequence
GGGGSGSGGSGGGSSGGGGSGGGGSGGGGSGGGGSGGGGSSSSGS

SEQ ID NO: 20 - protein, 119 aa, synthetic construct
  REGION 1..119: note = Artificial Sequence
DIKLQQSGAELARPGASVKMSCKTSGYTFTRYTMHWVKQRPGQGLEWIGYINPSRGYTNYNQKFKDKATLTTDKSSSTAYMQLSSLTSEDSAVYYCARYYDDHYSLDYWGQGTTLTVSS

SEQ ID NO: 21 - protein, 120 aa, synthetic construct
  REGION 1..120: note = Artificial Sequence
QVQLVQSGAEVKKPGASVKVSCKASGYTFTSYYIHWVRQAPGQGLEWIGSIYPGNVNTNYNEKFKDRATLTVDTSISTAYMELSRLRSDDTAVYFCTRSHYGLDWNFDVWGQGTTVTVSS

SEQ ID NO: 22 - protein, 122 aa, synthetic construct [sequence omitted]

SEQ ID NO: 23 - protein, 124 aa, synthetic construct
  REGION 1..124: note = Artificial Sequence
QVQLQQSGAELVRPGSSVKISCKASGYAFSSYWMNWVKQRPGQGLEWIGQIWPGDGDTNYNGKFKGKATLTADESSSTAYMQLSSLASEDSAVYFCARRETTTVGRYYYAMDYWGQGTTVTVSS

SEQ ID NO: 24 - protein, 120 aa, synthetic construct
  REGION 1..120: note = Artificial Sequence
QVQLVQSGAEVVKPGASVKVSCKASGYTFTSYYIHWVRQAPGQGLEWIGSIYPGNVNTNYAQKFQGRATLTVDTSISTAYMELSRLRSDDTAVYYCTRSHYGLDWNFDVWGKGTTVTVSS

SEQ ID NO: 25 - protein, 121 aa, synthetic construct
  REGION 1..121: note = Artificial Sequence
QVQLVESGGGVVQPGRSLRLSCAASGFTFTKAWMHWVRQAPGKQLEWVAQIKDKSNSYATYYADSVKGRFTISRDDSKNTLYLQMNSLRAEDTAVYYCRGVYYALSPFDYWGQGTLVTVSS

SEQ ID NO: 26 - protein, 106 aa, synthetic construct
  REGION 1..106: note = Artificial Sequence
DIQLTQSPAIMSASPGEKVTMTCRASSSVSYMNWYQQKSGTSPKRWIYDTSKVASGVPYRFSGSGSGTSYSLTISSMEAEDAATYYCQQWSSNPLTFGAGTKLELK

SEQ ID NO: 27 - protein, 107 aa, synthetic construct
  REGION 1..107: note = Artificial Sequence
DIQMTQSPSSLSASVGDRVTITCHASQNIYVWLNWYQQKPGKAPKLLIYKASNLHTGVPSRFSGSGSGTDFTLTISSLQPEDFATYYCQQGQTYPYTFGGGTKVEIK

SEQ ID NO: 28 - protein, 111 aa, synthetic construct
  REGION 1..111: note = Artificial Sequence
DIQLTQSPASLAVSLGQRATISCKASQSVDYDGDSYLNWYQQIPGQPPKLLIYDASNLVSGIPPRFSGSGSGTDFTLNIHPVEKVDAATYHCQQSTEDPWTFGGGTKLEIK

SEQ ID NO: 29 - protein, 107 aa, synthetic construct [sequence omitted]

SEQ ID NO: 30 - protein, 107 aa, synthetic construct
  REGION 1..107: note = Artificial Sequence
DIQMTQSPSSLSASVGDRVTITCQASQNIYVWLNWYQQKPGKAPKLLIYKASNLHTGVPSRFSGSGSGTDFTLTISSLQPEDIATYYCQQGQTYPYTFGQGTKLEIK

SEQ ID NO: 31 - protein, 112 aa, synthetic construct
  REGION 1..112: note = Artificial Sequence
DIVMTQTPLSLSVTPGQPASISCKSSQSLVHNNANTYLSWYLQKPGQSPQSLIYKVSNRFSGVPDRFSGSGSGTDFTLKISRVEAEDVGVYYCGQGTQYPFTFGSGTKVEIK

SEQ ID NO: 32 - protein, 490 aa, synthetic construct
  REGION 1..490: note = Artificial Sequence
DIQMTQSPSSLSASVGDRVTITCHASQNIYVWLNWYQQKPGKAPKLLIYKASNLHTGVPSRFSGSGSGTDFTLTISSLQPEDFATYYCQQGQTYPYTFGGGTKVEIKGGSSGDIQLTQSPAIMSASPGEKVTMTCRASSSVSYMNWYQQKSGTSPKRWIYDTSKVASGVPYRFSGSGSGTSYSLTISSMEAEDAATYYCQQWSSNPLTFGAGTKLELKGGGGSGGSGSGGGGSASGSGDIKLQQSGAELARPGASVKMSCKTSGYTFTRYTMHWVKQRPGQGLEWIGYINPSRGYTNYNQKFKDKATLTTDKSSSTAYMQLSSLTSEDSAVYYCARYYDDHYSLDYWGQGTTLTVSSGGSSGQVQLVQSGAEVKKPGASVKVSCKASGYTFTSYYIHWVRQAPGQGLEWIGSIYPGNVNTNYNEKFKDRATLTVDTSISTAYMELSRLRSDDTAVYFCTRSHYGLDWNFDVWGQGTTVTVSSHHHHHHHH

SEQ ID NO: 33 - protein, 502 aa, synthetic construct
  REGION 1..502: note = Artificial Sequence
DIQLTQSPASLAVSLGQRATISCKASQSVDYDGDSYLNWYQQIPGQPPKLLIYDASNLVSGIPPRFSGSGSGTDFTLNIHPVEKVDAATYHCQQSTEDPWTFGGGTKLEIKGGSSGEIVLTQSPATLSLSPGERATLSCRASQSVSSYLAWYQQKPGQAPRLLIYDASNRATGIPARFSGSGSGTDFTLTISSLEPEDFAVYYCQQRSNWPPTFGQGTKVEIKGGGGSGGSGSGGGGSASGSGEVQLLESGGGLVQPGGSLRLSCAVSGFTFNSFAMSWVRQAPGKGLEWVSAISGSGGGTYYADSVKGRFTISRDNSKNTLYLQMNSLRAEDTAVYFCAKDKILWFGEPVFDYWGQGTLVTVSSGGSSGQVQLQQSGAELVRPGSSVKISCKASGYAFSSYWMNWVKQRPGQGLEWIGQIWPGDGDTNYNGKFKGKATLTADESSSTAYMQLSSLASEDSAVYFCARRETTTVGRYYYAMDYWGQGTTVTVSSHHHHHHHH

SEQ ID NO: 34 - protein, 722 aa, synthetic construct
  REGION 1..722: note = Artificial Sequence
DIQMTQSPSSLSASVGDRVTITCQASQNIYVWLNWYQQKPGKAPKLLIYKASNLHTGVPSRFSGSGSGTDFTLTISSLQPEDIATYYCQQGQTYPYTFGQGTKLEIKGGSSGDIVMTQTPLSLSVTPGQPASISCKSSQSLVHNNANTYLSWYLQKPGQSPQSLIYKVSNRFSGVPDRFSGSGSGTDFTLKISRVEAEDVGVYYCGQGTQYPFTFGSGTKVEIKGGGGSGGSGSGGGGSASGSGQVQLVESGGGVVQPGRSLRLSCAASGFTFTKAWMHWVRQAPGKQLEWVAQIKDKSNSYATYYADSVKGRFTISRDDSKNTLYLQMNSLRAEDTAVYYCRGVYYALSPFDYWGQGTLVTVSSGGSSGQVQLVQSGAEVVKPGASVKVSCKASGYTFTSYYIHWVRQAPGQGLEWIGSIYPGNVNTNYAQKFQGRATLTVDTSISTAYMELSRLRSDDTAVYYCTRSHYGLDWNFDVWGKGTTVTVSSASGGSGDKTHTCPPCPAPEAAGGPSVFLFPPKPKDTLMISRTPEVTCVVVDVSHEDPEVKFNWYVDGVEVHNAKTKPREEQYNSTYRVVSVLTVLHQDWLNGKEYKCKVSNKALAAPIEKTISKAKGQPREPQVCTLPPSRDELTKNQVSLSCAVKGFYPSDIAVEWESNGQPENNYKTTPPVLDSDGSFFLVSKLTVDKSRWQQGNVFSCSVMHEALHNHYTQKSLSLSPG

SEQ ID NO: 35 - protein, 722 aa, synthetic construct
  REGION 1..722: note = Artificial Sequence
DIQMTQSPSSLSASVGDRVTITCQASQNIYVWLNWYQQKPGKAPKLLIYKASNLHTGVPSRFSGSGSGTDFTLTISSLQPEDIATYYCQQGQTYPYTFGQGTKLEIKGTVAADIVMTQTPLSLSVTPGQPASISCKSSQSLVHNNANTYLSWYLQKPGQSPQSLIYKVSNRFSGVPDRFSGSGSGTDFTLKISRVEAEDVGVYYCGQGTQYPFTFGSGTKVEIKGGGGSGGSGSGGGGSASGSGQVQLVESGGGVVQPGRSLRLSCAASGFTFTKAWMHWVRQAPGKQLEWVAQIKDKSNSYATYYADSVKGRFTISRDDSKNTLYLQMNSLRAEDTAVYYCRGVYYALSPFDYWGQGTLVTVSSASTGGQVQLVQSGAEVVKPGASVKVSCKASGYTFTSYYIHWVRQAPGQGLEWIGSIYPGNVNTNYAQKFQGRATLTVDTSISTAYMELSRLRSDDTAVYYCTRSHYGLDWNFDVWGKGTTVTVSSASGGSGDKTHTCPPCPAPEAAGGPSVFLFPPKPKDTLMISRTPEVTCVVVDVSHEDPEVKFNWYVDGVEVHNAKTKPREEQYNSTYRVVSVLTVLHQDWLNGKEYKCKVSNKALAAPIEKTISKAKGQPREPQVCTLPPSRDELTKNQVSLSCAVKGFYPSDIAVEWESNGQPENNYKTTPPVLDSDGSFFLVSKLTVDKSRWQQGNVFSCSVMHEALHNHYTQKSLSLSPG

SEQ ID NO: 36 - protein, 722 aa, synthetic construct
  REGION 1..722: note = Artificial Sequence
DIVMTQTPLSLSVTPGQPASISCKSSQSLVHNNANTYLSWYLQKPGQSPQSLIYKVSNRFSGVPDRFSGSGSGTDFTLKISRVEAEDVGVYYCGQGTQYPFTFGSGTKVEIKGGSSGDIQMTQSPSSLSASVGDRVTITCQASQNIYVWLNWYQQKPGKAPKLLIYKASNLHTGVPSRFSGSGSGTDFTLTISSLQPEDIATYYCQQGQTYPYTFGQGTKLEIKGGGGSGGSGSGGGGSASGSGQVQLVQSGAEVVKPGASVKVSCKASGYTFTSYYIHWVRQAPGQGLEWIGSIYPGNVNTNYAQKFQGRATLTVDTSISTAYMELSRLRSDDTAVYYCTRSHYGLDWNFDVWGKGTTVTVSSGGSSGQVQLVESGGGVVQPGRSLRLSCAASGFTFTKAWMHWVRQAPGKQLEWVAQIKDKSNSYATYYADSVKGRFTISRDDSKNTLYLQMNSLRAEDTAVYYCRGVYYALSPFDYWGQGTLVTVSSASGGSGDKTHTCPPCPAPEAAGGPSVFLFPPKPKDTLMISRTPEVTCVVVDVSHEDPEVKFNWYVDGVEVHNAKTKPREEQYNSTYRVVSVLTVLHQDWLNGKEYKCKVSNKALAAPIEKTISKAKGQPREPQVCTLPPSRDELTKNQVSLSCAVKGFYPSDIAVEWESNGQPENNYKTTPPVLDSDGSFFLVSKLTVDKSRWQQGNVFSCSVMHEALHNHYTQKSLSLSPG

SEQ ID NO: 37 - protein, 722 aa, synthetic construct
  REGION 1..722: note = Artificial Sequence
DIVMTQTPLSLSVTPGQPASISCKSSQSLVHNNANTYLSWYLQKPGQSPQSLIYKVSNRFSGVPDRFSGSGSGTDFTLKISRVEAEDVGVYYCGQGTQYPFTFGSGTKVEIKGTVAADIQMTQSPSSLSASVGDRVTITCQASQNIYVWLNWYQQKPGKAPKLLIYKASNLHTGVPSRFSGSGSGTDFTLTISSLQPEDIATYYCQQGQTYPYTFGQGTKLEIKGGGGSGGSGSGGGGSASGSGQVQLVQSGAEVVKPGASVKVSCKASGYTFTSYYIHWVRQAPGQGLEWIGSIYPGNVNTNYAQKFQGRATLTVDTSISTAYMELSRLRSDDTAVYYCTRSHYGLDWNFDVWGKGTTVTVSSASTGGQVQLVESGGGVVQPGRSLRLSCAASGFTFTKAWMHWVRQAPGKQLEWVAQIKDKSNSYATYYADSVKGRFTISRDDSKNTLYLQMNSLRAEDTAVYYCRGVYYALSPFDYWGQGTLVTVSSASGGSGDKTHTCPPCPAPEAAGGPSVFLFPPKPKDTLMISRTPEVTCVVVDVSHEDPEVKFNWYVDGVEVHNAKTKPREEQYNSTYRVVSVLTVLHQDWLNGKEYKCKVSNKALAAPIEKTISKAKGQPREPQVCTLPPSRDELTKNQVSLSCAVKGFYPSDIAVEWESNGQPENNYKTTPPVLDSDGSFFLVSKLTVDKSRWQQGNVFSCSVMHEALHNHYTQKSLSLSPG

SEQ ID NO: 38 - protein, 714 aa, synthetic construct
  REGION 1..714: note = Artificial Sequence
DIQMTQSPSSLSASVGDRVTITCHASQNIYVWLNWYQQKPGKAPKLLIYKASNLHTGVPSRFSGSGSGTDFTLTISSLQPEDFATYYCQQGQTYPYTFGGGTKVEIKGGSSGDIQLTQSPAIMSASPGEKVTMTCRASSSVSYMNWYQQKSGTSPKRWIYDTSKVASGVPYRFSGSGSGTSYSLTISSMEAEDAATYYCQQWSSNPLTFGAGTKLELKGGGGSGGSGSGGGGSASGSGDIKLQQSGAELARPGASVKMSCKTSGYTFTRYTMHWVKQRPGQGLEWIGYINPSRGYTNYNQKFKDKATLTTDKSSSTAYMQLSSLTSEDSAVYYCARYYDDHYSLDYWGQGTTLTVSSGGSSGQVQLVQSGAEVKKPGASVKVSCKASGYTFTSYYIHWVRQAPGQGLEWIGSIYPGNVNTNYNEKFKDRATLTVDTSISTAYMELSRLRSDDTAVYFCTRSHYGLDWNFDVWGQGTTVTVSSASGGSGDKTHTCPPCPAPEAAGGPSVFLFPPKPKDTLMISRTPEVTCVVVDVSHEDPEVKFNWYVDGVEVHNAKTKPREEQYNSTYRVVSVLTVLHQDWLNGKEYKCKVSNKALAAPIEKTISKAKGQPREPQVCTLPPSRDELTKNQVSLSCAVKGFYPSDIAVEWESNGQPENNYKTTPPVLDSDGSFFLVSKLTVDKSRWQQGNVFSCSVMHEALHNHYTQKSLSLSPG

SEQ ID NO: 39 - protein, 714 aa, synthetic construct
  REGION 1..714: note = Artificial Sequence
DIQLTQSPAIMSASPGEKVTMTCRASSSVSYMNWYQQKSGTSPKRWIYDTSKVASGVPYRFSGSGSGTSYSLTISSMEAEDAATYYCQQWSSNPLTFGAGTKLELKGGSSGDIQMTQSPSSLSASVGDRVTITCHASQNIYVWLNWYQQKPGKAPKLLIYKASNLHTGVPSRFSGSGSGTDFTLTISSLQPEDFATYYCQQGQTYPYTFGGGTKVEIKGGGGSGGSGSGGGGSASGSGQVQLVQSGAEVKKPGASVKVSCKASGYTFTSYYIHWVRQAPGQGLEWIGSIYPGNVNTNYNEKFKDRATLTVDTSISTAYMELSRLRSDDTAVYFCTRSHYGLDWNFDVWGQGTTVTVSSGGSSGDIKLQQSGAELARPGASVKMSCKTSGYTFTRYTMHWVKQRPGQGLEWIGYINPSRGYTNYNQKFKDKATLTTDKSSSTAYMQLSSLTSEDSAVYYCARYYDDHYSLDYWGQGTTLTVSSASGGSGDKTHTCPPCPAPEAAGGPSVFLFPPKPKDTLMISRTPEVTCVVVDVSHEDPEVKFNWYVDGVEVHNAKTKPREEQYNSTYRVVSVLTVLHQDWLNGKEYKCKVSNKALAAPIEKTISKAKGQPREPQVCTLPPSRDELTKNQVSLSCAVKGFYPSDIAVEWESNGQPENNYKTTPPVLDSDGSFFLVSKLTVDKSRWQQGNVFSCSVMHEALHNHYTQKSLSLSPG

SEQ ID NO: 40 - protein, 726 aa, synthetic construct
  REGION 1..726: note = Artificial Sequence
DIQLTQSPASLAVSLGQRATISCKASQSVDYDGDSYLNWYQQIPGQPPKLLIYDASNLVSGIPPRFSGSGSGTDFTLNIHPVEKVDAATYHCQQSTEDPWTFGGGTKLEIKGGSSGEIVLTQSPATLSLSPGERATLSCRASQSVSSYLAWYQQKPGQAPRLLIYDASNRATGIPARFSGSGSGTDFTLTISSLEPEDFAVYYCQQRSNWPPTFGQGTKVEIKGGGGSGGSGSGGGGSASGSGEVQLLESGGGLVQPGGSLRLSCAVSGFTFNSFAMSWVRQAPGKGLEWVSAISGSGGGTYYADSVKGRFTISRDNSKNTLYLQMNSLRAEDTAVYFCAKDKILWFGEPVFDYWGQGTLVTVSSGGSSGQVQLQQSGAELVRPGSSVKISCKASGYAFSSYWMNWVKQRPGQGLEWIGQIWPGDGDTNYNGKFKGKATLTADESSSTAYMQLSSLASEDSAVYFCARRETTTVGRYYYAMDYWGQGTTVTVSSASGGSGDKTHTCPPCPAPEAAGGPSVFLFPPKPKDTLMISRTPEVTCVVVDVSHEDPEVKFNWYVDGVEVHNAKTKPREEQYNSTYRVVSVLTVLHQDWLNGKEYKCKVSNKALAAPIEKTISKAKGQPREPQVYTLPPCRDELTKNQVSLWCLVKGFYPSDIAVEWESNGQPENNYKTTPPVLDSDGSFFLYSKLTVDKSRWQQGNVFSCSVMHEALHNHYTQKSLSLSPG

SEQ ID NO: 41 - protein, 726 aa, synthetic construct
  REGION 1..726: note = Artificial Sequence
EIVLTQSPATLSLSPGERATLSCRASQSVSSYLAWYQQKPGQAPRLLIYDASNRATGIPARFSGSGSGTDFTLTISSLEPEDFAVYYCQQRSNWPPTFGQGTKVEIKGGSSGDIQLTQSPASLAVSLGQRATISCKASQSVDYDGDSYLNWYQQIPGQPPKLLIYDASNLVSGIPPRFSGSGSGTDFTLNIHPVEKVDAATYHCQQSTEDPWTFGGGTKLEIKGGGGSGGSGSGGGGSASGSGQVQLQQSGAELVRPGSSVKISCKASGYAFSSYWMNWVKQRPGQGLEWIGQIWPGDGDTNYNGKFKGKATLTADESSSTAYMQLSSLASEDSAVYFCARRETTTVGRYYYAMDYWGQGTTVTVSSGGSSGEVQLLESGGGLVQPGGSLRLSCAVSGFTFNSFAMSWVRQAPGKGLEWVSAISGSGGGTYYADSVKGRFTISRDNSKNTLYLQMNSLRAEDTAVYFCAKDKILWFGEPVFDYWGQGTLVTVSSASGGSGDKTHTCPPCPAPEAAGGPSVFLFPPKPKDTLMISRTPEVTCVVVDVSHEDPEVKFNWYVDGVEVHNAKTKPREEQYNSTYRVVSVLTVLHQDWLNGKEYKCKVSNKALAAPIEKTISKAKGQPREPQVYTLPPCRDELTKNQVSLWCLVKGFYPSDIAVEWESNGQPENNYKTTPPVLDSDGSFFLYSKLTVDKSRWQQGNVFSCSVMHEALHNHYTQKSLSLSPG

SEQ ID NO: 42 - protein, 721 aa, synthetic construct
  REGION 1..721: note = Artificial Sequence
DIQLTQSPAIMSASPGEKVTMTCRASSSVSYMNWYQQKSGTSPKRWIYDTSKVASGVPYRFSGSGSGTSYSLTISSMEAEDAATYYCQQWSSNPLTFGAGTKLELKGGSSGDIQMTQSPSSLSASVGDRVTITCHASQNIYVWLNWYQQKPGKAPKLLIYKASNLHTGVPSRFSGSGSGTDFTLTISSLQPEDFATYYCQQGQTYPYTFGGGTKVEIKGGGGSGGSGSGGGGSASGSGQVQLVQSGAEVKKPGASVKVSCKASGYTFTSYYIHWVRQAPGQGLEWIGSIYPGNVNTNYNEKFKDRATLTVDTSISTAYMELSRLRSDDTAVYFCTRSHYGLDWNFDVWGQGTTVTVSSGGSSGDIKLQQSGAELARPGASVKMSCKTSGYTFTRYTMHWVKQRPGQGLEWIGYINPSRGYTNYNQKFKDKATLTTDKSSSTAYMQLSSLTSEDSAVYYCARYYDDHYSLDYWGQGTTLTVSSRTVAAPSVFIFPPSDEQLKSGTASVVCLLNNFYPREAKVQWKVDNALQSGNSQESVTEQDSKDSTYSLSSTLTLSKADYEKHKVYACEVTHQGLSSPVTKSFNRGECGGGGSGGSGSGGGGSASGSGASTKGPSVFPLAPSSKSTSGGTAALGCLVKDYFPEPVTVSWNSGALTSGVHTFPAVLQSSGLYSLSSVVTVPSSSLGTQTYICNVNHKPSNTKVDKKVEPKSCDKTHTCPPC

SEQ ID NO: 43 - protein, 721 aa, synthetic construct
  REGION 1..721: note = Artificial Sequence
DIQLTQSPAIMSASPGEKVTMTCRASSSVSYMNWYQQKSGTSPKRWIYDTSKVASGVPYRFSGSGSGTSYSLTISSMEAEDAATYYCQQWSSNPLTFGAGTKLELKGGSSGDIQMTQSPSSLSASVGDRVTITCHASQNIYVWLNWYQQKPGKAPKLLIYKASNLHTGVPSRFSGSGSGTDFTLTISSLQPEDFATYYCQQGQTYPYTFGGGTKVEIKGGGGSGGSGSGGGGSASGSGQVQLVQSGAEVKKPGASVKVSCKASGYTFTSYYIHWVRQAPGQGLEWIGSIYPGNVNTNYNEKFKDRATLTVDTSISTAYMELSRLRSDDTAVYFCTRSHYGLDWNFDVWGQGTTVTVSSGGSSGDIKLQQSGAELARPGASVKMSCKTSGYTFTRYTMHWVKQRPGQGLEWIGYINPSRGYTNYNQKFKDKATLTTDKSSSTAYMQLSSLTSEDSAVYYCARYYDDHYSLDYWGQGTTLTVSSASTKGPSVFPLAPSSKSTSGGTAALGCLVKDYFPEPVTVSWNSGALTSGVHTFPAVLQSSGLYSLSSVVTVPSSSLGTQTYICNVNHKPSNTKVDKKVEPKSCGGGGSGGSGSGGGGSASGSGRTVAAPSVFIFPPSDEQLKSGTASVVCLLNNFYPREAKVQWKVDNALQSGNSQESVTEQDSKDSTYSLSSTLTLSKADYEKHKVYACEVTHQGLSSPVTKSFNRGECDKTHTCPPC

SEQ ID NO: 44 - DNA, 1470 bp, synthetic construct
  misc_feature 1..1470: note = Artificial Sequence
  source 1..1470: mol_type = other DNA
gacatccagatgacacagagccctagcagcctgtctgccagcgtgggagacagagtgaccatcacatgtcacgccagccagaacatctacgtgtggctgaactggtatcagcagaagcccggcaaggcccctaagctgctgatctacaaggccagcaatctgcacaccggcgtgcccagcagattttctggctctggcagcggcaccgacttcaccctgaccatatctagcctgcagcctgaggacttcgccacctactattgtcagcagggccagacatacccctacacctttggcggcggaacaaaggtggaaatcaagggcggatcttctggagacatccagctgacacagagccctgccatcatgtctgctagccctggcgagaaagtgaccatgacctgtagagccagcagcagcgtgtcctacatgaactggtatcagcagaagtccggcacaagccccaagcggtggatctacgatacaagcaaggtggccagcggcgtgccctacagattttctggctctggcagcggcaccagctacagcctgacaatcagcagcatggaagccgaggatgccgccacctactactgccagcagtggtccagcaatcccctgacatttggagccggcaccaagctggaactgaagggaggcggaggatctggcggatctggaagtggcggcggtggatctgcttctggctctggcgacatcaagctgcagcagtctggcgccgaacttgctagacctggcgcctctgtgaagatgagctgcaagaccagcggctacaccttcaccagatacaccatgcactgggtcaagcagaggcctggacagggactcgagtggatcggctacatcaaccccagcagaggctacaccaactacaaccagaagttcaaggacaaggccacactgaccaccgacaagagcagcagcacagcctacatgcagctgagcagcctgaccagcgaagatagcgccgtgtactactgcgcccggtactacgacgatcactacagcctggattactggggccagggcacaaccctgacagtgtcatctggcggatcttctggacaggttcagctggttcagtctggcgccgaagtgaagaaacctggcgcctctgtgaaggtgtcctgcaaggccagcggctacacctttaccagctactacatccactgggtccgacaggcccctggacaaggactggaatggatcggcagcatctaccccggcaacgtgaacaccaactacaacgagaagttcaaggaccgggccacactgaccgtggacacctctatcagcaccgcctacatggaactgagccggctgagatccgatgataccgccgtgtacttctgcaccagaagccactacggcctggactggaacttcgatgtgtggggccagggcaccaccgtgacagtttcttctcaccaccatcatcaccatcaccac

SEQ ID NO: 45 - DNA, 1506 bp, synthetic construct
  misc_feature 1..1506: note = Artificial Sequence
  source 1..1506: mol_type = other DNA
gacatccagctgacacagagccctgcttctctggccgtgtctctgggacagagagccaccatcagctgcaaggccagccagagcgttgactacgacggcgacagctacctgaactggtatcagcagatccccggccagcctcctaagctgctgatctacgatgccagcaacctggtgtctggcatccctcctagattttccggcagcggctctggcaccgacttcaccctgaatatccatcctgtggaaaaggtggacgccgccacctaccactgtcagcagagcacagaagatccctggacctttggcggaggcaccaagctggaaatcaagggcggatcttctggagagatcgtgctgacacagtctcccgccacactgtcactgtctccaggcgaaagagccacactgagctgtagagccagccagagcgtgtcctcttacctggcctggtatcagcagaagcctggacaggctccccggctgctgatctacgatgccagcaatagagccacaggcatccccgccagattttctggctctggcagcggcaccgatttcaccctgaccataagcagcctggaacctgaggacttcgccgtgtactactgccagcagagaagcaactggcctcctacctttggccagggcaccaaggtggaaatcaagggaggcggaggatctggcggatctggaagtggcggcggtggatctgcttctggctctggcgaagtgcagctgctggaatctggcggaggactggttcaacctggcggctctctgagactgagctgtgccgtgtccggcttcaccttcaacagcttcgccatgagctgggtccgacaggcccctggaaaaggccttgaatgggtgtccgccatctctggaagcggcggaggcacatattacgccgactctgtgaagggcagattcaccatcagccgggacaacagcaagaacaccctgtacctgcagatgaacagcctgagagccgaggataccgccgtgtacttctgcgccaaggacaagatcctttggttcggcgagcccgtgttcgactattggggacagggaaccctggtcaccgtgtctagtggaggcagctctggccaggttcagctgcagcagtctggcgccgaactcgttagacctggcagcagcgtgaagatcagctgcaaggccagcggctacgccttcagcagctactggatgaactgggtcaagcagaggcctggacagggcctcgagtggatcggacaaatttggcctggcgacggcgacaccaactacaacggcaagttcaagggcaaagccacactgaccgccgacgagtctagcagcacagcctacatgcagctgtctagcctggccagcgaagatagcgccgtgtacttctgtgccagacgggaaaccaccaccgtgggcagatattactacgccatggactactggggccagggcaccacagtgacagtctcttctcaccaccatcatcaccatcaccac

SEQ ID NO: 46 - DNA, 2166 bp, synthetic construct
  misc_feature 1..2166: note = Artificial Sequence
  source 1..2166: mol_type = other DNA
gacatccagatgacacagagccctagcagcctgtctgccagcgtgggagacagagtgaccattacctgtcaggccagccagaacatctacgtgtggctgaactggtatcagcagaagcccggcaaggcccctaagctgctgatctacaaggccagcaatctgcacaccggcgtgcccagcagattttctggctctggcagcggcaccgacttcaccctgaccatatctagcctgcagcctgaggacattgccacctactactgtcagcagggccagacatacccctacacctttggccagggcaccaagctggaaatcaaaggcggaagcagcggcgacatcgtgatgacccaaacacctctgagcctgagcgtgacacctggacagcctgccagcatcagctgcaagtctagccagagcctggtgcacaacaacgccaacacctacctgtcctggtatctccagaaacctggccagtctcctcagagcctcatctataaggtgtccaacagattcagcggcgtgccagacaggtttagcggctctggatctggcacagatttcacactgaagatcagccgcgtggaagccgaggatgtgggcgtgtactattgcggccagggaacacagtaccctttcacctttggaagcggcacaaaggtcgagatcaaaggtggcggaggaagcggcggatcaggatctggcggcggaggatctgctagcggatctggacaggtgcagctggtggaatctggcggaggtgttgtgcagcctggcagaagcctgagactgtcttgtgccgccagcggcttcacctttaccaaggcctggatgcactgggtccgacaggcacctggaaagcagctggaatgggtcgcccagatcaaggacaagagcaacagctacgccacctattacgccgacagcgtgaagggcagattcaccatcagccgggacgacagcaagaacaccctgtacctgcagatgaacagcctgagagccgaggacaccgccgtgtactactgtagaggggtgtactacgctctgagccccttcgattattggggacagggcaccctggtcaccgtgtctagtggtggatctagtggccaggtccagctcgttcagtctggcgccgaagttgtgaaaccaggcgcctctgtgaaggtgtcctgtaaagcctccggctacacattcaccagctactacatccactgggttcgccaggctccaggccaaggacttgagtggatcggcagcatctaccccggcaacgtgaacaccaactacgcccagaagttccagggcagagccacactgacagtggacaccagcatctccaccgcctacatggaactgagccggctgagatccgacgatacagctgtgtattactgcaccagaagccactacggcctggactggaatttcgacgtgtggggcaagggcaccaccgtgacagttagttctgcttctggcggctccggagataagacccacacatgtcctccatgtcctgctccagaggctgctggtggcccttccgtgtttctgttccctccaaagcctaaggacaccctgatgatcagcaggacccctgaagtgacctgcgtggtggtggatgtgtctcacgaggacccagaagtgaagttcaattggtacgtggacggcgtggaagtgcacaacgccaagaccaagcctagagaggaacagtacaacagcacctacagagtggtgtccgtgctgaccgtgctgcaccaggattggctgaacggcaaagagtacaagtgcaaggtgtccaacaaggccctggccgctcctatcgagaaaaccatcagcaaggccaagggccagcctcgcgaacctcaagtctgtacactgcctcctagccgggacgagctgaccaagaatcaggtgtcactgagctgcgccgtgaagggcttttaccccagcgacattgccgtggaatgggagagcaatggccagccagagaacaactacaagacaacccctcctgtgctggacagcgacggctcatttttcctggtgtccaagctgacagtggacaagagcagatggcagcagggcaacgtgttcagctgcagcgtgatgcacgaggccctgcacaaccactacacccagaaaagcctgtctctgagccctggc

SEQ ID NO: 47 - DNA, 2166 bp, synthetic construct
  misc_feature 1..2166: note = Artificial Sequence
  source 1..2166: mol_type = other DNA
gacatccagatgacacagagccctagcagcctgtctgccagcgtgggagacagagtgaccattacctgtcaggccagccagaacatctacgtgtggctgaactggtatcagcagaagcccggcaaggcccctaagctgctgatctacaaggccagcaatctgcacaccggcgtgcccagcagattttctggctctggcagcggcaccgacttcaccctgaccatatctagcctgcagcctgaggacattgccacctactactgtcagcagggccagacatacccctacacctttggccagggcaccaagctggaaatcaagggaacagtggccgccgacatcgtgatgacccagacacctctgagcctgagcgtgacacctggacagcctgccagcatcagctgcaagtctagccagagcctggtgcacaacaacgccaacacctacctgtcctggtatctccagaaacctggccagtctcctcagagcctcatctataaggtgtccaacagattcagcggcgtgccagacaggtttagcggctctggatctggcacagatttcacactgaagatcagccgcgtggaagccgaggatgtgggcgtgtactattgcggccagggaacacagtaccctttcacctttggaagcggcacaaaggtcgagatcaaaggcggcggaggaagcggaggatcaggatctggcggaggcggatctgctagcggatctggacaggtgcagctggttgaaagtggtggcggagttgtgcagcctggcagaagcctgagactgtcttgtgccgccagcggcttcacctttaccaaggcctggatgcactgggtccgacaggcacctggaaagcagctggaatgggtcgcccagatcaaggacaagagcaacagctacgccacctattacgccgactccgtgaagggcagattcaccatcagccgggacgacagcaagaacaccctgtacctgcagatgaacagcctgagagccgaggacaccgccgtgtactactgtagaggggtgtactacgctctgagccccttcgattattggggacagggcaccctggtcaccgtgtctagtgcttctactggtggccaggtccagctcgttcagtctggcgccgaagttgtgaaaccaggcgcctctgtgaaggtgtcctgtaaagcctccggctacacattcaccagctactacatccactgggttcgccaggctccaggccaaggacttgagtggatcggcagcatctaccccggcaacgtgaacaccaactacgcccagaagttccagggcagagccacactgacagtggacaccagcatctccaccgcctacatggaactgagccggctgagatccgacgatacagctgtgtattactgcaccagaagccactacggcctggactggaatttcgacgtgtggggcaagggcaccaccgtgacagttagttctgcttctggcggctccggagataagacccacacatgtcctccatgtcctgctccagaggctgctggtggcccttccgtgtttctgttccctccaaagcctaaggacaccctgatgatcagcaggacccctgaagtgacctgcgtggtggtggatgtgtctcacgaggacccagaagtgaagttcaattggtacgtggacggcgtggaagtgcacaacgccaagaccaagcctagagaggaacagtacaacagcacctacagagtggtgtccgtgctgaccgtgctgcaccaggattggctgaacggcaaagagtacaagtgcaaggtgtccaacaaggccctggccgctcctatcgagaaaaccatcagcaaggccaagggccagcctcgcgaacctcaagtctgtacactgcctcctagccgggacgagctgaccaagaatcaggtgtcactgagctgcgccgtgaagggcttttaccccagcgacattgccgtggaatgggagagcaatggccagccagagaacaactacaagacaacccctcctgtgctggacagcgacggctcatttttcctggtgtccaagctgacagtggacaagagcagatggcagcagggcaacgtgttcagctgcagcgtgatgcacgaggccctgcacaaccactacacccagaaaagcctgtctctgagccctggc

SEQ ID NO: 48 - DNA, 2166 bp, synthetic construct
  misc_feature 1..2166: note = Artificial Sequence
  source 1..2166: mol_type = other DNA
gacatcgtgatgacccagacacctctgagcctgagcgtgacacctggacagcctgccagcatcagctgcaagtctagccagagcctggtgcacaacaacgccaacacctacctgagctggtatctgcagaagcccggccagtctcctcagagcctgatctacaaggtgtccaacagattcagcggcgtgcccgacagattttctggcagcggctctggcaccgacttcaccctgaagatcagcagagtggaagccgaggacgtgggcgtgtactattgtggccagggcacacagtaccccttcacatttggaagcggcaccaaggtggaaatcaaaggcggcagctctggcgacatccagatgacacagagccctagcagcctgtctgccagcgtgggagacagagtgaccattacctgtcaggccagccagaacatctacgtgtggctgaattggtatcagcaaaagcctggcaaggcccctaagctgctcatctataaggccagcaacctgcacaccggcgtgccaagcagattctctggatctggctccggcacagatttcacactgaccataagcagcctgcagcctgaggacattgccacctactactgtcagcagggccagacatacccctacaccttcggccagggaacaaagctcgagatcaaaggtggcggcggaagcggcggatcaggatctggtggcggaggatctgcttctggctctggacaggttcagctggtgcagtctggcgccgaggttgtgaaacctggcgcctccgtgaaggtgtcctgtaaagccagcggctacacctttaccagctactacatccactgggtccgacaggcccctggacaaggacttgagtggatcggcagcatctaccccggcaacgtgaacaccaactacgcccagaagttccagggcagagccactctgacagtggacaccagcatctccaccgcctacatggaactgagccggctgagatccgatgacaccgccgtgtactactgtaccagaagccactacggcctggactggaatttcgacgtgtggggcaagggcaccaccgtgacagttagttctggcggctctagcggccaggtgcagcttgttgaatctggcggaggtgttgtgcagcccggcagaagtctgagactgtcttgtgccgcctccggcttcaccttcacaaaggcctggatgcactgggttcgccaggctccaggcaaacagctggaatgggttgcccagatcaaggacaagagcaacagctacgccacctattacgccgacagcgtgaagggcagattcaccatcagccgggacgacagcaagaacaccctgtacctgcagatgaacagcctgagagccgaggatacagccgtctactattgccggggagtgtactacgctctgagcccctttgattactggggacagggcaccctggtcaccgtgtcctctgcaagcggaggatccggagataagacccacacatgtcctccatgtcctgctccagaggctgctggtggcccttccgtgtttctgttccctccaaagcctaaggacaccctgatgatcagcaggacccctgaagtgacctgcgtggtggtggatgtgtctcacgaggacccagaagtgaagttcaattggtacgtggacggcgtggaagtgcacaacgccaagaccaagcctagagaggaacagtacaacagcacctacagagtggtgtccgtgctgaccgtgctgcaccaggattggctgaacggcaaagagtacaagtgcaaggtgtccaacaaggccctggccgctcctatcgagaaaaccatcagcaaggccaagggccagcctcgcgaacctcaagtctgtacactgcctcctagccgggacgagctgaccaagaatcaggtgtcactgagctgcgccgtgaagggcttttaccccagcgacattgccgtggaatgggagagcaatggccagccagagaacaactacaagacaacccctcctgtgctggacagcgacggctcatttttcctggtgtccaagctgacagtggacaagagcagatggcagcagggcaacgtgttcagctgcagcgtgatgcacgaggccctgcacaaccactacacccagaaaagcctgtctctgagccctggc

SEQ ID NO: 49 - DNA, 2166 bp, synthetic construct
  misc_feature 1..2166: note = Artificial Sequence
  source 1..2166: mol_type = other DNA
gacatcgtgatgacccagacacctctgagcctgagcgtgacacctggacagcctgccagcatcagctgcaagtctagccagagcctggtgcacaacaacgccaacacctacctgagctggtatctgcagaagcccggccagtctcctcagagcctgatctacaaggtgtccaacagattcagcggcgtgcccgacagattttctggcagcggctctggcaccgacttcaccctgaagatcagcagagtggaagccgaggacgtgggcgtgtactattgtggccagggcacacagtaccccttcacatttggaagcggcaccaaggtggaaatcaagggcacagtggccgccgacatccagatgacacagagcccttctagcctgtctgccagcgtgggcgacagagtgacaattacctgtcaggccagccagaacatctacgtgtggctgaattggtatcagcaaaagcctggcaaggcccctaagctgctcatctataaggccagcaacctgcacaccggcgtgccaagcagattctctggatctggctccggcacagatttcacactgaccataagcagcctgcagcctgaggacattgccacctactactgtcagcagggccagacatacccctacaccttcggccagggaacaaagctcgagatcaaaggcggcggaggaagcggcggatcaggatctggtggcggaggatctgcttctggctctggacaggttcagctggtgcagtctggcgccgaggttgtgaaacctggcgcctccgtgaaggtgtcctgtaaagccagcggctacacctttaccagctactacatccactgggtccgacaggcccctggacaaggacttgagtggatcggcagcatctaccccggcaacgtgaacaccaactacgcccagaagttccagggcagagccactctgacagtggacaccagcatctccaccgcctacatggaactgagccggctgagatccgatgacaccgccgtgtactactgtaccagaagccactacggcctggactggaatttcgacgtgtggggcaagggcaccaccgtgacagtttctagcgcttctacaggcggccaggtgcagcttgttgaatctggcggaggtgttgtgcagcccggcagaagtctgagactgtcttgtgccgcctccggcttcaccttcacaaaggcctggatgcactgggttcgccaggctccaggcaaacagctggaatgggttgcccagatcaaggacaagagcaacagctacgccacctattacgccgacagcgtgaagggcagattcaccatcagccgggacgacagcaagaacaccctgtacctgcagatgaacagcctgagagccgaggatacagccgtctactattgccggggagtgtactacgctctgagcccctttgattactggggacagggcaccctggtcaccgtgtcctctgcaagcggaggatccggagataagacccacacatgtcctccatgtcctgctccagaggctgctggtggcccttccgtgtttctgttccctccaaagcctaaggacaccctgatgatcagcaggacccctgaagtgacctgcgtggtggtggatgtgtctcacgaggacccagaagtgaagttcaattggtacgtggacggcgtggaagtgcacaacgccaagaccaagcctagagaggaacagtacaacagcacctacagagtggtgtccgtgctgaccgtgctgcaccaggattggctgaacggcaaagagtacaagtgcaaggtgtccaacaaggccctggccgctcctatcgagaaaaccatcagcaaggccaagggccagcctcgcgaacctcaagtctgtacactgcctcctagccgggacgagctgaccaagaatcaggtgtcactgagctgcgccgtgaagggcttttaccccagcgacattgccgtggaatgggagagcaatggccagccagagaacaactacaagacaacccctcctgtgctggacagcgacggctcatttttcctggtgtccaagctgacagtggacaagagcagatggcagcagggcaacgtgttcagctgcagcgtgatgcacgaggccctgcacaaccactacacccagaaaagcctgtctctgagccctggc

SEQ ID NO: 50 - DNA, 2142 bp, synthetic construct
  misc_feature 1..2142: note = Artificial Sequence
  source 1..2142: mol_type = other DNA
gacatccagatgacacagagccctagcagcctgtctgccagcgtgggagacagagtgaccatcacatgtcacgccagccagaacatctacgtgtggctgaactggtatcagcagaagcccggcaaggcccctaagctgctgatctacaaggccagcaatctgcacaccggcgtgcccagcagattttctggctctggcagcggcaccgacttcaccctgaccatatctagcctgcagcctgaggacttcgccacctactattgtcagcagggccagacatacccctacacctttggcggcggaacaaaggtggaaatcaagggcggatcttctggagacatccagctgacacagagccctgccatcatgtctgctagccctggcgagaaagtgaccatgacctgtagagccagcagcagcgtgtcctacatgaactggtatcagcagaagtccggcacaagccccaagcggtggatctacgatacaagcaaggtggccagcggcgtgccctacagattttctggctctggcagcggcaccagctacagcctgacaatcagcagcatggaagccgaggatgccgccacctactactgccagcagtggtccagcaatcccctgacatttggagccggcaccaagctggaactgaagggaggcggaggatctggcggatctggaagtggcggcggtggatctgcttctggctctggcgacatcaagctgcagcagtctggcgccgaacttgctagacctggcgcctctgtgaagatgagctgcaagaccagcggctacaccttcaccagatacaccatgcactgggtcaagcagaggcctggacagggactcgagtggatcggctacatcaaccccagcagaggctacaccaactacaaccagaagttcaaggacaaggccacactgaccaccgacaagagcagcagcacagcctacatgcagctgagcagcctgaccagcgaagatagcgccgtgtactactgcgcccggtactacgacgatcactacagcctggattactggggccagggcacaaccctgacagtgtcatctggaggcagctctggccaggttcagctggttcagtctggcgccgaagtgaagaaacctggcgcctctgtgaaggtgtcctgcaaggccagcggctacacctttaccagctactacatccactgggtccgacaggcccctggacaaggactggaatggatcggcagcatctaccccggcaacgtgaacaccaactacaacgagaagttcaaggaccgggccacactgaccgtggacacctctatcagcaccgcctacatggaactgagccggctgagatccgatgataccgccgtgtacttctgcaccagaagccactacggcctggactggaacttcgatgtgtggggccagggcaccaccgtgacagtttcttctgctagtggcggctccggagataagacccacacatgtcctccatgtcctgctccagaggctgctggtggcccttccgtgtttctgttccctccaaagcctaaggacaccctgatgatcagcaggacccctgaagtgacctgcgtggtggtggatgtgtctcacgaggacccagaagtgaagttcaattggtacgtggacggcgtggaagtgcacaacgccaagaccaagcctagagaggaacagtacaacagcacctacagagtggtgtccgtgctgaccgtgctgcaccaggattggctgaacggcaaagagtacaagtgcaaggtgtccaacaaggccctggccgctcctatcgagaaaaccatcagcaaggccaagggccagcctcgcgaacctcaagtctgtacactgcctcctagccgggacgagctgaccaagaatcaggtgtcactgagctgcgccgtgaagggcttttaccccagcgacattgccgtggaatgggagagcaatggccagccagagaacaactacaagacaacccctcctgtgctggacagcgacggctcatttttcctggtgtccaagctgacagtggacaagagcagatggcagcagggcaacgtgttcagctgcagcgtgatgcacgaggccctgcacaaccactacacccagaaaagcctgtctctgagccctggc

SEQ ID NO: 51 - DNA, 2142 bp, synthetic construct
  misc_feature 1..2142: note = Artificial Sequence
  source 1..2142: mol_type = other DNA
gacatccagctgacacagagccctgccatcatgtctgctagccctggcgagaaagtgaccatgacctgtagagccagcagcagcgtgtcctacatgaactggtatcagcagaagtccggcacaagccccaagcggtggatctacgatacaagcaaggtggccagcggcgtgccctacagattttctggctctggcagcggcaccagctacagcctgacaatcagcagcatggaagccgaggatgccgccacctactactgccagcagtggtccagcaatcccctgacatttggagccggcaccaagctggaactgaagggcggatcttctggagacatccagatgacacagagccctagcagcctgtctgccagcgtgggagacagagtgaccatcacatgtcacgccagccagaacatctacgtgtggctgaactggtatcagcagaagcccggcaaggcccctaagctgctgatctacaaggccagcaatctgcacaccggcgtgcccagcagattttctggctctggcagcggcaccgacttcaccctgaccatatctagcctgcagcctgaggacttcgccacctactattgtcagcagggccagacatacccctacacctttggcggcggaacaaaggtggaaatcaagggaggcggaggatctggcggatctggaagtggcggcggtggatctgcttctggctctggccaggttcagctggttcagtctggcgccgaagtgaagaaacctggcgcctctgtgaaggtgtcctgcaaggccagcggctacacctttaccagctactacatccactgggtccgacaggcccctggacaaggactggaatggatcggcagcatctaccccggcaacgtgaacaccaactacaacgagaagttcaaggaccgggccacactgaccgtggacacctctatcagcaccgcctacatggaactgagccggctgagatccgatgataccgccgtgtacttctgcaccagaagccactacggcctggactggaacttcgatgtgtggggccagggcaccaccgtgacagtttcttctggaggcagctctggcgacatcaagctgcagcagtctggcgccgaacttgctagacctggcgcctctgtgaagatgagctgcaagaccagcggctacaccttcaccagatacaccatgcactgggtcaagcagaggcctggacagggactcgagtggatcggctacatcaaccccagcagaggctacaccaactacaaccagaagttcaaggacaaggccacactgaccaccgacaagagcagcagcacagcctacatgcagctgagcagcctgaccagcgaagatagcgccgtgtactactgcgcccggtactacgacgatcactacagcctggattactggggccagggcacaaccctgacagtgtcatctgctagtggcggctccggagataagacccacacatgtcctccatgtcctgctccagaggctgctggtggcccttccgtgtttctgttccctccaaagcctaaggacaccctgatgatcagcaggacccctgaagtgacctgcgtggtggtggatgtgtctcacgaggacccagaagtgaagttcaattggtacgtggacggcgtggaagtgcacaacgccaagaccaagcctagagaggaacagtacaacagcacctacagagtggtgtccgtgctgaccgtgctgcaccaggattggctgaacggcaaagagtacaagtgcaaggtgtccaacaaggccctggccgctcctatcgagaaaaccatcagcaaggccaagggccagcctcgcgaacctcaagtctgtacactgcctcctagccgggacgagctgaccaagaatcaggtgtcactgagctgcgccgtgaagggcttttaccccagcgacattgccgtggaatgggagagcaatggccagccagagaacaactacaagacaacccctcctgtgctggacagcgacggctcatttttcctggtgtccaagctgacagtggacaagagcagatggcagcagggcaacgtgttcagctgcagcgtgatgcacgaggccctgcacaaccactacacccagaaaagcctgtctctgagccctggc

SEQ ID NO: 52 - DNA, 2178 bp, synthetic construct
  misc_feature 1..2178: note = Artificial Sequence
  source 1..2178: mol_type = other DNA
gacatccagctgacacagagccctgcttctctggccgtgtctctgggacagagagccaccatcagctgcaaggccagccagagcgttgactacgacggcgacagctacctgaactggtatcagcagatccccggccagcctcctaagctgctgatctacgatgccagcaacctggtgtctggcatccctcctagattttccggcagcggctctggcaccgacttcaccctgaatatccatcctgtggaaaaggtggacgccgccacctaccactgtcagcagagcacagaagatccctggacctttggcggaggcaccaagctggaaatcaagggcggatcttctggagagatcgtgctgacacagtctcccgccacactgtcactgtctccaggcgaaagagccacactgagctgtagagccagccagagcgtgtcctcttacctggcctggtatcagcagaagcctggacaggctccccggctgctgatctacgatgccagcaatagagccacaggcatccccgccagattttctggctctggcagcggcaccgatttcaccctgaccataagcagcctggaacctgaggacttcgccgtgtactactgccagcagagaagcaactggcctcctacctttggccagggcaccaaggtggaaatcaagggaggcggaggatctggcggatctggaagtggcggcggtggatctgcttctggctctggcgaagtgcagctgctggaatctggcggaggactggttcaacctggcggctctctgagactgagctgtgccgtgtccggcttcaccttcaacagcttcgccatgagctgggtccgacaggcccctggaaaaggccttgaatgggtgtccgccatctctggaagcggcggaggcacatattacgccgactctgtgaagggcagattcaccatcagccgggacaacagcaagaacaccctgtacctgcagatgaacagcctgagagccgaggataccgccgtgtacttctgcgccaaggacaagatcctttggttcggcgagcccgtgttcgactattggggacagggaaccctggtcaccgtgtctagtggaggcagctctggccaggttcagctgcagcagtctggcgccgaactcgttagacctggcagcagcgtgaagatcagctgcaaggccagcggctacgccttcagcagctactggatgaactgggtcaagcagaggcctggacagggcctcgagtggatcggacaaatttggcctggcgacggcgacaccaactacaacggcaagttcaagggcaaagccacactgaccgccgacgagtctagcagcacagcctacatgcagctgtctagcctggccagcgaagatagcgccgtgtacttctgtgccagacgggaaaccaccaccgtgggcagatattactacgccatggactactggggccagggcaccacagtgacagtctcttctgctagtggcggctccggagataagacccacacatgtcctccatgtcctgctccagaagctgccggcggaccttccgtgtttctgttccctccaaagcctaaggacaccctgatgatcagcaggacccctgaagtgacctgcgtggtggtggatgtgtctcacgaggacccagaagtgaagttcaattggtacgtggacggcgtggaagtgcacaacgccaagaccaagcctagagaggaacagtacaacagcacctacagagtggtgtccgtgctgacagtgctgcaccaggattggctgaacggcaaagagtacaagtgcaaggtgtccaacaaggccctggctgcccctatcgagaaaaccatcagcaaggccaagggccagcctagggaaccccaggtttacacccttcctccatgccgggatgagctgaccaagaaccaggtgtccctgtggtgtctggtcaagggcttctaccccagcgacattgccgtggaatgggagagcaatggccagcctgagaacaactacaagaccacacctcctgtgctggactccgacggatcattcttcctgtacagcaagctgactgtggacaagagcagatggcagcagggcaacgtgttcagctgcagcgtgatgcacgaggccctgcacaaccactacacacagaagtccctgtctctgagccctggc

SEQ ID NO: 53 - DNA, 2178 bp, synthetic construct
  misc_feature 1..2178: note = Artificial Sequence
  source 1..2178: mol_type = other DNA
gagatcgtgctgacacagtctcccgccacactgtcactgtctccaggcgaaagagccacactgagctgtagagccagccagagcgtgtcctcttacctggcctggtatcagcagaagcctggacaggctccccggctgctgatctacgatgccagcaatagagccacaggcatccccgccagattttctggctctggcagcggcaccgatttcaccctgaccataagcagcctggaacctgaggacttcgccgtgtactactgccagcagagaagcaactggcctcctacctttggccagggcaccaaggtggaaatcaagggcggatcttctggagacatccagctgacacagagccctgcttctctggccgtgtctctgggacagagagccaccatcagctgcaaggccagccagagcgttgactacgacggcgacagctacctgaactggtatcagcagatccccggccagcctcctaagctgctgatctacgatgccagcaacctggtgtctggcatccctcctagattttccggcagcggctctggcaccgacttcaccctgaatatccatcctgtggaaaaggtggacgccgccacctaccactgtcagcagagcacagaagatccctggacctttggcggaggcaccaagctggaaatcaagggaggcggaggatctggcggatctggaagtggcggcggtggatctgcttctggctctggccaggttcagctgcagcagtctggcgccgaactcgttagacctggcagcagcgtgaagatcagctgcaaggccagcggctacgccttcagcagctactggatgaactgggtcaagcagaggcctggacagggcctcgagtggatcggacaaatttggcctggcgacggcgacaccaactacaacggcaagttcaagggcaaagccacactgaccgccgacgagtctagcagcacagcctacatgcagctgtctagcctggccagcgaagatagcgccgtgtacttctgtgccagacgggaaaccaccaccgtgggcagatattactacgccatggactactggggccagggcaccacagtgacagtctcttctggaggcagctctggcgaagtgcagctgctggaatctggcggaggactggttcaacctggcggctctctgagactgagctgtgccgtgtccggcttcaccttcaacagcttcgccatgagctgggtccgacaggcccctggaaaaggccttgaatgggtgtccgccatctctggaagcggcggaggcacatattacgccgactctgtgaagggcagattcaccatcagccgggacaacagcaagaacaccctgtacctgcagatgaacagcctgagagccgaggataccgccgtgtacttctgcgccaaggacaagatcctttggttcggcgagcccgtgttcgactattggggacagggaaccctggtcaccgtgtctagtgctagtggcggctccggagataagacccacacatgtcctccatgtcctgctccagaagctgccggcggaccttccgtgtttctgttccctccaaagcctaaggacaccctgatgatcagcaggacccctgaagtgacctgcgtggtggtggatgtgtctcacgaggacccagaagtgaagttcaattggtacgtggacggcgtggaagtgcacaacgccaagaccaagcctagagaggaacagtacaacagcacctacagagtggtgtccgtgctgacagtgctgcaccaggattggctgaacggcaaagagtacaagtgcaaggtgtccaacaaggccctggctgcccctatcgagaaaaccatcagcaaggccaagggccagcctagggaaccccaggtttacacccttcctccatgccgggatgagctgaccaagaaccaggtgtccctgtggtgtctggtcaagggcttctaccccagcgacattgccgtggaatgggagagcaatggccagcctgagaacaactacaagaccacacctcctgtgctggactccgacggatcattcttcctgtacagcaagctgactgtggacaagagcagatggcagcagggcaacgtgttcagctgcagcgtgatgcacgaggccctgcacaaccactacacacagaagtccctgtctctgagccctggc

SEQ ID NO: 54 - DNA, 2814 bp, synthetic construct
  misc_feature 1..2814: note = Artificial Sequence
  source 1..2814: mol_type = other DNA
gacatccagctgacacagagccctgccatcatgagcgcttccccaggcgagaaagtgaccatgacctgtagagccagcagcagcgtgtcctacatgaactggtatcagcagaagtccggcacaagccccaagcggtggatctacgatacaagcaaggtggccagcggcgtgccctacagattttctggctctggcagcggcaccagctacagcctgacaatcagcagcatggaagccgaggatgccgccacctactactgccagcagtggtccagcaatcccctgacatttggagccggcaccaagctggaactgaaaggcggaagctctggcgacattcagatgacccagtctccaagcagcctgagcgcctctgtgggcgacagagtgaccattacatgtcacgccagccagaacatctacgtgtggctcaattggtatcaacaaaagcctggcaaggcccctaagctgctgatctacaaggccagcaatctgcacaccggcgtgccaagcagattcagcggatctggatctggcaccgacttcaccctgaccataagctccctgcagccagaggacttcgccacatattattgtcagcagggccagacatacccctacacctttggcggcggaacaaaggtggaaatcaaaggcggcggaggcagcggaggatctggaagcggaggtggtggatctgctagtggctctggacaggtgcagctggttcagtctggcgccgaagtgaagaaacctggcgcctccgtgaaggtgtcctgcaaggcttctggctacacattcacaagctactacatccactgggtccgacaggcccctggacaaggacttgagtggatcggcagcatctaccccggcaacgtgaacaccaactacaacgagaagttcaaggaccgggccacactgaccgtggacacctctatcagcaccgcctatatggaactgagccggctgagaagcgacgataccgccgtgtacttctgcaccagaagccactacggcctggactggaacttcgatgtgtggggccagggcaccaccgtgacagttagttctggcggatctagcggcgacatcaagctgcagcaaagcggagccgaactggctagacctggcgcaagcgtgaagatgagctgcaagaccagcggctataccttcaccagatacaccatgcactgggtcaagcagaggccaggccaaggcttggaatggattggctacatcaaccccagccggggctacaccaattacaatcaaaagtttaaggataaggccacgctgaccaccgacaagagcagcagcacagcctacatgcagctgtccagcctgaccagcgaagattctgccgtgtattactgcgcccggtactacgacgaccactactccctggattactggggacagggaacaaccctgaccgtgtccagcagaacagtggccgctcctagcgtgttcatcttcccaccttccgacgagcagctgaaaagcggcacagcctctgtcgtgtgcctgctgaacaacttctaccccagagaagccaaggtgcagtggaaggtggacaacgccctgcagagcggcaatagccaagagagcgtgaccgagcaggacagcaaggactccacctatagcctgagcagcaccctgacactgagcaaggccgactacgagaagcacaaagtgtacgcctgcgaagtgacccaccagggcctttctagccctgtgaccaagagcttcaacagaggcgaatgtggcggtggcggaagtggcggctcaggatctggcggaggcggatctgcttcaggttctggagcttcgaccaagggcccatccgtgtttcctctggctcccagcagcaagtctacaagcggaggaacagccgctctgggctgcctggtcaaggattactttcccgagcctgtgaccgtgtcctggaattctggcgctctgacaagcggcgtgcacacctttccagctgtgctgcaaagcagcggcctgtactctctgagcagcgtggtcacagtgcctagctctagcctgggcacccagacctacatctgcaatgtgaaccacaagcctagcaacaccaaggtggacaagaaggtggaacccaagagctgcgataagacccacacatgtcctccatgtcctgctccagaggctgctggtggcccttccgtgtttctgttccctccaaagcctaaggacaccctgatgatcagcaggacccctgaagtgacctgcgtggtggtggatgtgtctcacgaggacccagaagtgaagttcaattggtacgtggacggcgtggaagtgcacaacgccaagaccaagcctagagaggaacagtacaacagcacctacagagtggtgtccgtgctgaccgtgctgcaccaggattggctgaacggcaaagagtacaagtgcaaggtgtccaacaaggccctggccgctcctatcgagaaaaccatcagcaaggccaagggccagcctcgcgaacctcaagtctgtacactgcctcctagccgggacgagctgaccaagaatcaggtgtcactgagctgcgccgtgaagggcttttaccccagcgacattgccgtggaatgggagagcaatggccagccagagaacaactacaagacaacccctcctgtgctggacagcgacggctcatttttcctggtgtccaagctgacagtggacaagagcagatggcagcagggcaacgtgttcagctgcagcgtgatgcacgaggccctgcacaaccactacacccagaaaagcctgtctctgagccctggc

SEQ ID NO: 55 - DNA, 2814 bp, synthetic construct
  misc_feature 1..2814: note = Artificial Sequence
  source 1..2814: mol_type = other DNA
gacatccagctgacacagagccctgccatcatgtctgctagccctggcgagaaagtgaccatgacctgtagagccagcagcagcgtgtcctacatgaactggtatcagcagaagtccggcacaagccccaagcggtggatctacgatacaagcaaggtggccagcggcgtgccctacagattttctggctctggcagcggcaccagctacagcctgacaatcagcagcatggaagccgaggatgccgccacctactactgccagcagtggtccagcaatcccctgacatttggagccggcaccaagctggaactgaagggcggatcttctggagacatccagatgacacagagccctagcagcctgtctgccagcgtgggagacagagtgaccatcacatgtcacgccagccagaacatctacgtgtggctgaactggtatcagcagaagcccggcaaggcccctaagctgctgatctacaaggccagcaatctgcacaccggcgtgcccagcagattttctggctctggcagcggcaccgacttcaccctgaccatatctagcctgcagcctgaggacttcgccacctactattgtcagcagggccagacatacccctacacctttggcggcggaacaaaggtggaaatcaagggaggcggaggatctggcggatctggaagtggcggcggtggatctgcttctggctctggccaggttcagctggttcagtctggcgccgaagtgaagaaacctggcgcctctgtgaaggtgtcctgcaaggccagcggctacacctttaccagctactacatccactgggtccgacaggcccctggacaaggactggaatggatcggcagcatctaccccggcaacgtgaacaccaactacaacgagaagttcaaggaccgggccacactgaccgtggacacctctatcagcaccgcctacatggaactgagccggctgagatccgatgataccgccgtgtacttctgcaccagaagccactacggcctggactggaacttcgatgtgtggggccagggcaccaccgtgacagtttcttctggaggcagctctggcgacatcaagctgcagcagtctggcgccgaacttgctagacctggcgcctctgtgaagatgagctgcaagaccagcggctacaccttcaccagatacaccatgcactgggtcaagcagaggcctggacagggactcgagtggatcggctacatcaaccccagcagaggctacaccaactacaaccagaagttcaaggacaaggccacactgaccaccgacaagagcagcagcacagcctacatgcagctgagcagcctgaccagcgaagatagcgccgtgtactactgcgcccggtactacgacgatcactacagcctggattactggggccagggcacaaccctgacagtgtcatctgccagcacaaaggggcccagcgtgttccctctggctcccagcagcaagtctacaagcggaggaacagccgctctgggctgcctggtcaaggattactttcccgagcctgtgacagtgtcctggaactctggcgctctgacatctggcgtgcacacctttccagccgtgctgcaatcttccggcctgtactctctgagcagcgtcgtgacagtgcctagcagctctctgggcacccagacctacatctgcaatgtgaaccacaagcctagcaacaccaaggtggacaagaaggtggaacccaagagctgtggcggtggcggaagtggcggctcaggatctggcggaggcggatctgcttcaggttctggacgtacggtggccgctcccagcgtgttcatcttcccacctagcgacgagcagctgaagtccggcacagcctctgtcgtgtgcctgctgaacaacttctacccccgcgaggccaaagtgcagtggaaggtggacaacgccctgcagagcggcaacagccaggaaagcgtgaccgagcaggacagcaaggactccacctacagcctgagcagcaccctgacactgagcaaggccgactacgagaagcacaaggtgtacgcctgcgaagtgacccaccagggcctgtctagccccgtgaccaagagcttcaaccggggcgagtgtgataagacccacacatgtcctccatgtcctgctccagagctgctgggtggcccttccgtgtttctgttccctccaaagcctaaggacaccctgatgatcagcaggacccctgaagtgacctgcgtggtggtggatgtgtctcacgaggacccagaagtgaagttcaattggtacgtggacggcgtggaagtgcacaacgccaagaccaagcctagagaggaacagtacaacagcacctacagagtggtgtccgtgctgaccgtgctgcaccaggattggctgaacggcaaagagtacaagtgcaaggtgtccaacaaggccctgcccgctcctatcgagaaaaccatcagcaaggccaagggccagcctcgcgaacctcaagtctgtacactgcctcctagccgggacgagctgaccaagaatcaggtgtcactgagctgcgccgtgaagggcttttaccccagcgacattgccgtggaatgggagagcaatggccagccagagaacaactacaagacaacccctcctgtgctggacagcgacggctcatttttcctggtgtccaagctgacagtggacaagagcagatggcagcagggcaacgtgttcagctgcagcgtgatgcacgaggccctgcacaaccactacacccagaaaagcctgtctctgagccctggc

SEQ ID NO: 56 - protein, 9 aa, synthetic construct
  REGION 1..9: note = Artificial Sequence
GYTFTSYYI

SEQ ID NO: 57 - protein, 8 aa, synthetic construct
  REGION 1..8: note = Artificial Sequence
IYPGNVNT

SEQ ID NO: 58 - protein, 10 aa, synthetic construct
  REGION 1..10: note = Artificial Sequence
SHYGLDWNFD

SEQ ID NO: 59 - protein, 9 aa, synthetic construct
  REGION 1..9: note = Artificial Sequence
HASQNIYVW

SEQ ID NO: 60 - protein, 7 aa, synthetic construct
  REGION 1..7: note = Artificial Sequence
KASNLHT

SEQ ID NO: 61 - protein, 9 aa, synthetic construct
  REGION 1..9: note = Artificial Sequence
QQGQTYPYT

SEQ ID NO: 62 - protein, 706 aa, synthetic construct
  REGION 1..706: note = Artificial Sequence
DIQMTQSPSSLSASVGDRVTITCHASQNIYVWLNWYQQKPGKAPKLLIYKASNLHTGVPSRFSGSGSGTDFTLTISSLQPEDFATYYCQQGQTYPYTFGGGTKVEIKGDIQLTQSPAIMSASPGEKVTMTCRASSSVSYMNWYQQKSGTSPKRWIYDTSKVASGVPYRFSGSGSGTSYSLTISSMEAEDAATYYCQQWSSNPLTFGAGTKLELKGGGGSGGSGSGGGGSASGSGDIKLQQSGAELARPGASVKMSCKTSGYTFTRYTMHWVKQRPGQGLEWIGYINPSRGYTNYNQKFKDKATLTTDKSSSTAYMQLSSLTSEDSAVYYCARYYDDHYSLDYWGQGTTLTVSSGQVQLVQSGAEVKKPGASVKVSCKASGYTFTSYYIHWVRQAPGQGLEWIGSIYPGNVNTNYNEKFKDRATLTVDTSISTAYMELSRLRSDDTAVYFCTRSHYGLDWNFDVWGQGTTVTVSSASGGSGDKTHTCPPCPAPEAAGGPSVFLFPPKPKDTLMISRTPEVTCVVVDVSHEDPEVKFNWYVDGVEVHNAKTKPREEQYNSTYRVVSVLTVLHQDWLNGKEYKCKVSNKALAAPIEKTISKAKGQPREPQVCTLPPSRDELTKNQVSLSCAVKGFYPSDIAVEWESNGQPENNYKTTPPVLDSDGSFFLVSKLTVDKSRWQQGNVFSCSVMHEALHNHYTQKSLSLSPG

SEQ ID NO: 63 - protein, 724 aa, synthetic construct
  REGION 1..724: note = Artificial Sequence
DIQMTQSPSSLSASVGDRVTITCHASQNIYVWLNWYQQKPGKAPKLLIYKASNLHTGVPSRFSGSGSGTDFTLTISSLQPEDFATYYCQQGQTYPYTFGGGTKVEIKSGGSGSSGGSDIQLTQSPAIMSASPGEKVTMTCRASSSVSYMNWYQQKSGTSPKRWIYDTSKVASGVPYRFSGSGSGTSYSLTISSMEAEDAATYYCQQWSSNPLTFGAGTKLELKGGGGSGGSGSGGGGSASGSGDIKLQQSGAELARPGASVKMSCKTSGYTFTRYTMHWVKQRPGQGLEWIGYINPSRGYTNYNQKFKDKATLTTDKSSSTAYMQLSSLTSEDSAVYYCARYYDDHYSLDYWGQGTTLTVSSGGSGGSSGSSQVQLVQSGAEVKKPGASVKVSCKASGYTFTSYYIHWVRQAPGQGLEWIGSIYPGNVNTNYNEKFKDRATLTVDTSISTAYMELSRLRSDDTAVYFCTRSHYGLDWNFDVWGQGTTVTVSSASGGSGDKTHTCPPCPAPEAAGGPSVFLFPPKPKDTLMISRTPEVTCVVVDVSHEDPEVKFNWYVDGVEVHNAKTKPREEQYNSTYRVVSVLTVLHQDWLNGKEYKCKVSNKALAAPIEKTISKAKGQPREPQVCTLPPSRDELTKNQVSLSCAVKGFYPSDIAVEWESNGQPENNYKTTPPVLDSDGSFFLVSKLTVDKSRWQQGNVFSCSVMHEALHNHYTQKSLSLSPG

SEQ ID NO: 64 - protein, 718 aa, synthetic construct
  REGION 1..718: note = Artificial Sequence
DIQLTQSPASLAVSLGQRATISCKASQSVDYDGDSYLNWYQQIPGQPPKLLIYDASNLVSGIPPRFSGSGSGTDFTLNIHPVEKVDAATYHCQQSTEDPWTFGGGTKLEIKGEIVLTQSPATLSLSPGERATLSCRASQSVSSYLAWYQQKPGQAPRLLIYDASNRATGIPARFSGSGSGTDFTLTISSLEPEDFAVYYCQQRSNWPPTFGQGTKVEIKGGGGSGGSGSGGGGSASGSGEVQLLESGGGLVQPGGSLRLSCAVSGFTFNSFAMSWVRQAPGKGLEWVSAISGSGGGTYYADSVKGRFTISRDNSKNTLYLQMNSLRAEDTAVYFCAKDKILWFGEPVFDYWGQGTLVTVSSGQVQLQQSGAELVRPGSSVKISCKASGYAFSSYWMNWVKQRPGQGLEWIGQIWPGDGDTNYNGKFKGKATLTADESSSTAYMQLSSLASEDSAVYFCARRETTTVGRYYYAMDYWGQGTTVTVSSASGGSGDKTHTCPPCPAPEAAGGPSVFLFPPKPKDTLMISRTPEVTCVVVDVSHEDPEVKFNWYVDGVEVHNAKTKPREEQYNSTYRVVSVLTVLHQDWLNGKEYKCKVSNKALAAPIEKTISKAKGQPREPQVCTLPPSRDELTKNQVSLSCAVKGFYPSDIAVEWESNGQPENNYKTTPPVLDSDGSFFLVSKLTVDKSRWQQGNVFSCSVMHEALHNHYTQKSLSLSPG

SEQ ID NO: 65 - protein, 736 aa, synthetic construct
  REGION 1..736: note = Artificial Sequence
DIQLTQSPASLAVSLGQRATISCKASQSVDYDGDSYLNWYQQIPGQPPKLLIYDASNLVSGIPPRFSGSGSGTDFTLNIHPVEKVDAATYHCQQSTEDPWTFGGGTKLEIKSGGSGSSGGSEIVLTQSPATLSLSPGERATLSCRASQSVSSYLAWYQQKPGQAPRLLIYDASNRATGIPARFSGSGSGTDFTLTISSLEPEDFAVYYCQQRSNWPPTFGQGTKVEIKGGGGSGGSGSGGGGSASGSGEVQLLESGGGLVQPGGSLRLSCAVSGFTFNSFAMSWVRQAPGKGLEWVSAISGSGGGTYYADSVKGRFTISRDNSKNTLYLQMNSLRAEDTAVYFCAKDKILWFGEPVFDYWGQGTLVTVSSGGSGGSSGSSQVQLQQSGAELVRPGSSVKISCKASGYAFSSYWMNWVKQRPGQGLEWIGQIWPGDGDTNYNGKFKGKATLTADESSSTAYMQLSSLASEDSAVYFCARRETTTVGRYYYAMDYWGQGTTVTVSSASGGSGDKTHTCPPCPAPEAAGGPSVFLFPPKPKDTLMISRTPEVTCVVVDVSHEDPEVKFNWYVDGVEVHNAKTKPREEQYNSTYRVVSVLTVLHQDWLNGKEYKCKVSNKALAAPIEKTISKAKGQPREPQVYTLPPCRDELTKNQVSLWCLVKGFYPSDIAVEWESNGQPENNYKTTPPVLDSDGSFFLYSKLTVDKSRWQQGNVFSCSVMHEALHNHYTQKSLSLSPG

SEQ ID NO: 66 - protein, 811 aa, synthetic construct
  REGION 1..811: note = Artificial Sequence
DIQMTQSPSSLSASVGDRVTITCHASQNIYVWLNWYQQKPGKAPKLLIYKASNLHTGVPSRFSGSGSGTDFTLTISSLQPEDFATYYCQQGQTYPYTFGGGTKVEIKGGSSGDIQLTQSPAIMSASPGEKVTMTCRASSSVSYMNWYQQKSGTSPKRWIYDTSKVASGVPYRFSGSGSGTSYSLTISSMEAEDAATYYCQQWSSNPLTFGAGTKLELKGGGGSGGSGSGGGGSASGSGDIKLQQSGAELARPGASVKMSCKTSGYTFTRYTMHWVKQRPGQGLEWIGYINPSRGYTNYNQKFKDKATLTTDKSSSTAYMQLSSLTSEDSAVYYCARYYDDHYSLDYWGQGTTLTVSSGGSSGQVQLVQSGAEVKKPGASVKVSCKASGYTFTSYYIHWVRQAPGQGLEWIGSIYPGNVNTNYNEKFKDRATLTVDTSISTAYMELSRLRSDDTAVYFCTRSHYGLDWNFDVWGQGTTVTVSSASTKGPSVFPLAPSSKSTSGGTAALGCLVKDYFPEPVTVSWNSGALTSGVHTFPAVLQSSGLYSLSSVVTVPSSSLGTQTYICNVNHKPSNTKVDKKVEPKSCDKTHTCPPCPAPEAAGGPSVFLFPPKPKDTLMISRTPEVTCVVVDVSHEDPEVKFNWYVDGVEVHNAKTKPREEQYNSTYRVVSVLTVLHQDWLNGKEYKCKVSNKALAAPIEKTISKAKGQPREPQVCTLPPSRDELTKNQVSLSCAVKGFYPSDIAVEWESNGQPENNYKTTPPVLDSDGSFFLVSKLTVDKSRWQQGNVFSCSVMHEALHNHYTQKSLSLSPG

SEQ ID NO: 67 - protein, 827 aa, synthetic construct
  REGION 1..827: note = Artificial Sequence
DIQLTQSPASLAVSLGQRATISCKASQSVDYDGDSYLNWYQQIPGQPPKLLIYDASNLVSGIPPRFSGSGSGTDFTLNIHPVEKVDAATYHCQQSTEDPWTFGGGTKLEIKGGSSGEIVLTQSPATLSLSPGERATLSCRASQSVSSYLAWYQQKPGQAPRLLIYDASNRATGIPARFSGSGSGTDFTLTISSLEPEDFAVYYCQQRSNWPPTFGQGTKVEIKGGGGSGGSGSGGGGSASGSGEVQLLESGGGLVQPGGSLRLSCAVSGFTFNSFAMSWVRQAPGKGLEWVSAISGSGGGTYYADSVKGRFTISRDNSKNTLYLQMNSLRAEDTAVYFCAKDKILWFGEPVFDYWGQGTLVTVSSGGSSGQVQLQQSGAELVRPGSSVKISCKASGYAFSSYWMNWVKQRPGQGLEWIGQIWPGDGDTNYNGKFKGKATLTADESSSTAYMQLSSLASEDSAVYFCARRETTTVGRYYYAMDYWGQGTTVTVSSATVAAPSVFIFPPSDEQLKSGTASVVCLLNNFYPREAKVQWKVDNALQSGNSQESVTEQDSKDSTYSLSSTLTLSKADYEKHKVYACEVTHQGLSSPVTKSFNRGECDKTHTCPPCPAPEAAGGPSVFLFPPKPKDTLMISRTPEVTCVVVDVSHEDPEVKFNWYVDGVEVHNAKTKPREEQYNSTYRVVSVLTVLHQDWLNGKEYKCKVSNKALAAPIEKTISKAKGQPREPQVYTLPPCRDELTKNQVSLWCLVKGFYPSDIAVEWESNGQPENNYKTTPPVLDSDGSFFLYSKLTVDKSRWQQGNVFSCSVMHEALHNHYTQKSLSLSPG

SEQ ID NO: 68 - protein, 811 aa, synthetic construct
  REGION 1..811: note = Artificial Sequence
DIQMTQSPSSLSASVGDRVTITCHASQNIYVWLNWYQQKPGKAPKLLIYKASNLHTGVPSRFSGSGSGTDFTLTISSLQPEDFATYYCQQGQTYPYTFGGGTKVEIKGGSSGDIQLTQSPAIMSASPGEKVTMTCRASSSVSYMNWYQQKSGTSPKRWIYDTSKVASGVPYRFSGSGSGTSYSLTISSMEAEDAATYYCQQWSSNPLTFGAGTKLELKGGGGSGGSGSGGGGSASGSGDIKLQQSGAELARPGASVKMSCKTSGYTFTRYTMHWVKQRPGQGLEWIGYINPSRGYTNYNQKFKDKATLTTDKSSSTAYMQLSSLTSEDSAVYYCARYYDDHYSLDYWGQGTTLTVSSGGSSGQVQLVQSGAEVKKPGASVKVSCKASGYTFTSYYIHWVRQAPGQGLEWIGSIYPGNVNTNYNEKFKDRATLTVDTSISTAYMELSRLRSDDTAVYFCTRSHYGLDWNFDVWGQGTTVTVSSASTKGPSVFPLAPSSKSTSGGTAALGCLVKDYFPEPVTVSWNSGALTSGVHTFPAVLQSSGLYSLSSVVTVPSSSLGTQTYICNVNHKPSNTKVDKKVEPKSSDKTHTCPPCPAPEAAGGPSVFLFPPKPKDTLMISRTPEVTCVVVDVSHEDPEVKFNWYVDGVEVHNAKTKPREEQYNSTYRVVSVLTVLHQDWLNGKEYKCKVSNKALAAPIEKTISKAKGQPREPQVCTLPPSRDELTKNQVSLSCAVKGFYPSDIAVEWESNGQPENNYKTTPPVLDSDGSFFLVSKLTVDKSRWQQGNVFSCSVMHEALHNHYTQKSLSLSPG

SEQ ID NO: 69 - protein, 611 aa, synthetic construct
  REGION 1..611: note = Artificial Sequence
DIQLTQSPASLAVSLGQRATISCKASQSVDYDGDSYLNWYQQIPGQPPKLLIYDASNLVSGIPPRFSGSGSGTDFTLNIHPVEKVDAATYHCQQSTEDPWTFGGGTKLEIKGGSSGEIVLTQSPATLSLSPGERATLSCRASQSVSSYLAWYQQKPGQAPRLLIYDASNRATGIPARFSGSGSGTDFTLTISSLEPEDFAVYYCQQRSNWPPTFGQGTKVEIKGGGGSGGSGSGGGGSASGSGEVQLLESGGGLVQPGGSLRLSCAVSGFTFNSFAMSWVRQAPGKGLEWVSAISGSGGGTYYADSVKGRFTISRDNSKNTLYLQMNSLRAEDTAVYFCAKDKILWFGEPVFDYWGQGTLVTVSSGGSSGQVQLQQSGAELVRPGSSVKISCKASGYAFSSYWMNWVKQRPGQGLEWIGQIWPGDGDTNYNGKFKGKATLTADESSSTAYMQLSSLASEDSAVYFCARRETTTVGRYYYAMDYWGQGTTVTVSSATVAAPSVFIFPPSDEQLKSGTASVVCLLNNFYPREAKVQWKVDNALQSGNSQESVTEQDSKDSTYSLSSTLTLSKADYEKHKVYACEVTHQGLSSPVTKSFNRGESDKTHTCPPCP

SEQ ID NO: 70 - protein, 813 aa, synthetic construct
  REGION 1..813: note = Artificial Sequence
DIQMTQSPSSLSASVGDRVTITCHASQNIYVWLNWYQQKPGKAPKLLIYKASNLHTGVPSRFSGSGSGTDFTLTISSLQPEDFATYYCQQGQTYPYTFGGGTKVEIKGGSSGDIQLTQSPAIMSASPGEKVTMTCRASSSVSYMNWYQQKSGTSPKRWIYDTSKVASGVPYRFSGSGSGTSYSLTISSMEAEDAATYYCQQWSSNPLTFGAGTKLELKGGGGSGGSGSGGGGSASGSGDIKLQQSGAELARPGASVKMSCKTSGYTFTRYTMHWVKQRPGQGLEWIGYINPSRGYTNYNQKFKDKATLTTDKSSSTAYMQLSSLTSEDSAVYYCARYYDDHYSLDYWGQGTTLTVSSGGSSGQVQLVQSGAEVKKPGASVKVSCKASGYTFTSYYIHWVRQAPGQGLEWIGSIYPGNVNTNYNEKFKDRATLTVDTSISTAYMELSRLRSDDTAVYFCTRSHYGLDWNFDVWGQGTTVTVSSASTKGPSVFPLAPSSKSTSGGTAALGCLVKDYFPEPVTVSWNSGALTSGVHTFPAVLQSSGLYSLSSVVTVPSSSLGTQTYICNVNHKPSNTKVDKKVEPKTPLGDTTHTCPPCPAPEAAGGPSVFLFPPKPKDTLMISRTPEVTCVVVDVSHEDPEVKFNWYVDGVEVHNAKTKPREEQYNSTYRVVSVLTVLHQDWLNGKEYKCKVSNKALAAPIEKTISKAKGQPREPQVCTLPPSRDELTKNQVSLSCAVKGFYPSDIAVEWESNGQPENNYKTTPPVLDSDGSFFLVSKLTVDKSRWQQGNVFSCSVMHEALHNHYTQKSLSLSPG

SEQ ID NO: 71 - protein, 830 aa, synthetic construct
  REGION 1..830: note = Artificial Sequence
DIQLTQSPASLAVSLGQRATISCKASQSVDYDGDSYLNWYQQIPGQPPKLLIYDASNLVSGIPPRFSGSGSGTDFTLNIHPVEKVDAATYHCQQSTEDPWTFGGGTKLEIKGGSSGEIVLTQSPATLSLSPGERATLSCRASQSVSSYLAWYQQKPGQAPRLLIYDASNRATGIPARFSGSGSGTDFTLTISSLEPEDFAVYYCQQRSNWPPTFGQGTKVEIKGGGGSGGSGSGGGGSASGSGEVQLLESGGGLVQPGGSLRLSCAVSGFTFNSFAMSWVRQAPGKGLEWVSAISGSGGGTYYADSVKGRFTISRDNSKNTLYLQMNSLRAEDTAVYFCAKDKILWFGEPVFDYWGQGTLVTVSSGGSSGQVQLQQSGAELVRPGSSVKISCKASGYAFSSYWMNWVKQRPGQGLEWIGQIWPGDGDTNYNGKFKGKATLTADESSSTAYMQLSSLASEDSAVYFCARRETTTVGRYYYAMDYWGQGTTVTVSSATVAAPSVFIFPPSDEQLKSGTASVVCLLNNFYPREAKVQWKVDNALQSGNSQESVTEQDSKDSTYSLSSTLTLSKADYEKHKVYACEVTHQGLSSPVTKSFNRGETPLGDTTHTCPPCPAPEAAGGPSVFLFPPKPKDTLMISRTPEVTCVVVDVSHEDPEVKFNWYVDGVEVHNAKTKPREEQYNSTYRVVSVLTVLHQDWLNGKEYKCKVSNKALAAPIEKTISKAKGQPREPQVYTLPPCRDELTKNQVSLWCLVKGFYPSDIAVEWESNGQPENNYKTTPPVLDSDGSFFLYSKLTVDKSRWQQGNVFSCSVMHEALHNHYTQKSLSLSPG

SEQ ID NO: 72 - protein, 814 aa, synthetic construct
  REGION 1..814: note = Artificial Sequence
DIQMTQSPSSLSASVGDRVTITCHASQNIYVWLNWYQQKPGKAPKLLIYKASNLHTGVPSRFSGSGSGTDFTLTISSLQPEDFATYYCQQGQTYPYTFGGGTKVEIKGGSSGDIQLTQSPAIMSASPGEKVTMTCRASSSVSYMNWYQQKSGTSPKRWIYDTSKVASGVPYRFSGSGSGTSYSLTISSMEAEDAATYYCQQWSSNPLTFGAGTKLELKGGGGSGGSGSGGGGSASGSGDIKLQQSGAELARPGASVKMSCKTSGYTFTRYTMHWVKQRPGQGLEWIGYINPSRGYTNYNQKFKDKATLTTDKSSSTAYMQLSSLTSEDSAVYYCARYYDDHYSLDYWGQGTTLTVSSGGSSGQVQLVQSGAEVKKPGASVKVSCKASGYTFTSYYIHWVRQAPGQGLEWIGSIYPGNVNTNYNEKFKDRATLTVDTSISTAYMELSRLRSDDTAVYFCTRSHYGLDWNFDVWGQGTTVTVSSGSSASTKGPSVFPLAPSSKSTSGGTAALGCLVKDYFPEPVTVSWNSGALTSGVHTFPAVLQSSGLYSLSSVVTVPSSSLGTQTYICNVNHKPSNTKVDKKVEPKSCDKTHTCPPCPAPEAAGGPSVFLFPPKPKDTLMISRTPEVTCVVVDVSHEDPEVKFNWYVDGVEVHNAKTKPREEQYNSTYRVVSVLTVLHQDWLNGKEYKCKVSNKALAAPIEKTISKAKGQPREPQVYTLPPCRDELTKNQVSLWCLVKGFYPSDIAVEWESNGQPENNYKTTPPVLDSDGSFFLYSKLTVDKSRWQQGNVFSCSVMHEALHNHYTQKSLSLSPG

SEQ ID NO: 73 - protein, 829 aa, synthetic construct
  REGION 1..829: note = Artificial Sequence
DIQLTQSPASLAVSLGQRATISCKASQSVDYDGDSYLNWYQQIPGQPPKLLIYDASNLVSGIPPRFSGSGSGTDFTLNIHPVEKVDAATYHCQQSTEDPWTFGGGTKLEIKGGSSGEIVLTQSPATLSLSPGERATLSCRASQSVSSYLAWYQQKPGQAPRLLIYDASNRATGIPARFSGSGSGTDFTLTISSLEPEDFAVYYCQQRSNWPPTFGQGTKVEIKGGGGSGGSGSGGGGSASGSGEVQLLESGGGLVQPGGSLRLSCAVSGFTFNSFAMSWVRQAPGKGLEWVSAISGSGGGTYYADSVKGRFTISRDNSKNTLYLQMNSLRAEDTAVYFCAKDKILWFGEPVFDYWGQGTLVTVSSGGSSGQVQLQQSGAELVRPGSSVKISCKASGYAFSSYWMNWVKQRPGQGLEWIGQIWPGDGDTNYNGKFKGKATLTADESSSTAYMQLSSLASEDSAVYFCARRETTTVGRYYYAMDYWGQGTTVTVSSASGTVAAPSVFIFPPSDEQLKSGTASVVCLLNNFYPREAKVQWKVDNALQSGNSQESVTEQDSKDSTYSLSSTLTLSKADYEKHKVYACEVTHQGLSSPVTKSFNRGECDKTHTCPPCPAPEAAGGPSVFLFPPKPKDTLMISRTPEVTCVVVDVSHEDPEVKFNWYVDGVEVHNAKTKPREEQYNSTYRVVSVLTVLHQDWLNGKEYKCKVSNKALAAPIEKTISKAKGQPREPQVYTLPPCRDELTKNQVSLWCLVKGFYPSDIAVEWESNGQPENNYKTTPPVLDSDGSFFLYSKLTVDKSRWQQGNVFSCSVMHEALHNHYTQKSLSLSPG

SEQ ID NO: 74 - protein, 816 aa, synthetic construct
  REGION 1..816: note = Artificial Sequence
DIQMTQSPSSLSASVGDRVTITCHASQNIYVWLNWYQQKPGKAPKLLIYKASNLHTGVPSRFSGSGSGTDFTLTISSLQPEDFATYYCQQGQTYPYTFGGGTKVEIKGGSSGDIQLTQSPAIMSASPGEKVTMTCRASSSVSYMNWYQQKSGTSPKRWIYDTSKVASGVPYRFSGSGSGTSYSLTISSMEAEDAATYYCQQWSSNPLTFGAGTKLELKGGGGSGGSGSGGGGSASGSGDIKLQQSGAELARPGASVKMSCKTSGYTFTRYTMHWVKQRPGQGLEWIGYINPSRGYTNYNQKFKDKATLTTDKSSSTAYMQLSSLTSEDSAVYYCARYYDDHYSLDYWGQGTTLTVSSGGSSGQVQLVQSGAEVKKPGASVKVSCKASGYTFTSYYIHWVRQAPGQGLEWIGSIYPGNVNTNYNEKFKDRATLTVDTSISTAYMELSRLRSDDTAVYFCTRSHYGLDWNFDVWGQGTTVTVSSGSSGSASTKGPSVFPLAPSSKSTSGGTAALGCLVKDYFPEPVTVSWNSGALTSGVHTFPAVLQSSGLYSLSSVVTVPSSSLGTQTYICNVNHKPSNTKVDKKVEPKSCDKTHTCPPCPAPEAAGGPSVFLFPPKPKDTLMISRTPEVTCVVVDVSHEDPEVKFNWYVDGVEVHNAKTKPREEQYNSTYRVVSVLTVLHQDWLNGKEYKCKVSNKALAAPIEKTISKAKGQPREPQVCTLPPSRDELTKNQVSLSCAVKGFYPSDIAVEWESNGQPENNYKTTPPVLDSDGSFFLVSKLTVDKSRWQQGNVFSCSVMHEALHNHYTQKSLSLSPG

SEQ ID NO: 75 - protein, 831 aa, synthetic construct
  REGION 1..831: note = Artificial Sequence
DIQLTQSPASLAVSLGQRATISCKASQSVDYDGDSYLNWYQQIPGQPPKLLIYDASNLVSGIPPRFSGSGSGTDFTLNIHPVEKVDAATYHCQQSTEDPWTFGGGTKLEIKGGSSGEIVLTQSPATLSLSPGERATLSCRASQSVSSYLAWYQQKPGQAPRLLIYDASNRATGIPARFSGSGSGTDFTLTISSLEPEDFAVYYCQQRSNWPPTFGQGTKVEIKGGGGSGGSGSGGGGSASGSGEVQLLESGGGLVQPGGSLRLSCAVSGFTFNSFAMSWVRQAPGKGLEWVSAISGSGGGTYYADSVKGRFTISRDNSKNTLYLQMNSLRAEDTAVYFCAKDKILWFGEPVFDYWGQGTLVTVSSGGSSGQVQLQQSGAELVRPGSSVKISCKASGYAFSSYWMNWVKQRPGQGLEWIGQIWPGDGDTNYNGKFKGKATLTADESSSTAYMQLSSLASEDSAVYFCARRETTTVGRYYYAMDYWGQGTTVTVSSASGGSTVAAPSVFIFPPSDEQLKSGTASVVCLLNNFYPREAKVQWKVDNALQSGNSQESVTEQDSKDSTYSLSSTLTLSKADYEKHKVYACEVTHQGLSSPVTKSFNRGECDKTHTCPPCPAPEAAGGPSVFLFPPKPKDTLMISRTPEVTCVVVDVSHEDPEVKFNWYVDGVEVHNAKTKPREEQYNSTYRVVSVLTVLHQDWLNGKEYKCKVSNKALAAPIEKTISKAKGQPREPQVYTLPPCRDELTKNQVSLWCLVKGFYPSDIAVEWESNGQPENNYKTTPPVLDSDGSFFLYSKLTVDKSRWQQGNVFSCSVMHEALHNHYTQKSLSLSPG

SEQ ID NO: 76 - protein, 714 aa, synthetic construct
  REGION 1..714: note = Artificial Sequence
DIKLQQSGAELARPGASVKMSCKTSGYTFTRYTMHWVKQRPGQGLEWIGYINPSRGYTNYNQKFKDKATLTTDKSSSTAYMQLSSLTSEDSAVYYCARYYDDHYSLDYWGQGTTLTVSSGGSSGQVQLVQSGAEVKKPGASVKVSCKASGYTFTSYYIHWVRQAPGQGLEWIGSIYPGNVNTNYNEKFKDRATLTVDTSISTAYMELSRLRSDDTAVYFCTRSHYGLDWNFDVWGQGTTVTVSSGGGGSGGSGSGGGGSASGSGDIQMTQSPSSLSASVGDRVTITCHASQNIYVWLNWYQQKPGKAPKLLIYKASNLHTGVPSRFSGSGSGTDFTLTISSLQPEDFATYYCQQGQTYPYTFGGGTKVEIKGGSSGDIQLTQSPAIMSASPGEKVTMTCRASSSVSYMNWYQQKSGTSPKRWIYDTSKVASGVPYRFSGSGSGTSYSLTISSMEAEDAATYYCQQWSSNPLTFGAGTKLELKASGGSGDKTHTCPPCPAPEAAGGPSVFLFPPKPKDTLMISRTPEVTCVVVDVSHEDPEVKFNWYVDGVEVHNAKTKPREEQYNSTYRVVSVLTVLHQDWLNGKEYKCKVSNKALAAPIEKTISKAKGQPREPQVCTLPPSRDELTKNQVSLSCAVKGFYPSDIAVEWESNGQPENNYKTTPPVLDSDGSFFLVSKLTVDKSRWQQGNVFSCSVMHEALHNHYTQKSLSLSPG

SEQ ID NO: 77 - protein, 714 aa, synthetic construct
  REGION 1..714: note = Artificial Sequence
QVQLVQSGAEVKKPGASVKVSCKASGYTFTSYYIHWVRQAPGQGLEWIGSIYPGNVNTNYNEKFKDRATLTVDTSISTAYMELSRLRSDDTAVYFCTRSHYGLDWNFDVWGQGTTVTVSSGGSSGDIKLQQSGAELARPGASVKMSCKTSGYTFTRYTMHWVKQRPGQGLEWIGYINPSRGYTNYNQKFKDKATLTTDKSSSTAYMQLSSLTSEDSAVYYCARYYDDHYSLDYWGQGTTLTVSSGGGGSGGSGSGGGGSASGSGDIQLTQSPAIMSASPGEKVTMTCRASSSVSYMNWYQQKSGTSPKRWIYDTSKVASGVPYRFSGSGSGTSYSLTISSMEAEDAATYYCQQWSSNPLTFGAGTKLELKGGSSGDIQMTQSPSSLSASVGDRVTITCHASQNIYVWLNWYQQKPGKAPKLLIYKASNLHTGVPSRFSGSGSGTDFTLTISSLQPEDFATYYCQQGQTYPYTFGGGTKVEIKASGGSGDKTHTCPPCPAPEAAGGPSVFLFPPKPKDTLMISRTPEVTCVVVDVSHEDPEVKFNWYVDGVEVHNAKTKPREEQYNSTYRVVSVLTVLHQDWLNGKEYKCKVSNKALAAPIEKTISKAKGQPREPQVCTLPPSRDELTKNQVSLSCAVKGFYPSDIAVEWESNGQPENNYKTTPPVLDSDGSFFLVSKLTVDKSRWQQGNVFSCSVMHEALHNHYTQKSLSLSPG

SEQ ID NO: 78 - protein, 726 aa, synthetic construct
  REGION 1..726: note = Artificial Sequence
EVQLLESGGGLVQPGGSLRLSCAVSGFTFNSFAMSWVRQAPGKGLEWVSAISGSGGGTYYADSVKGRFTISRDNSKNTLYLQMNSLRAEDTAVYFCAKDKILWFGEPVFDYWGQGTLVTVSSGGSSGQVQLQQSGAELVRPGSSVKISCKASGYAFSSYWMNWVKQRPGQGLEWIGQIWPGDGDTNYNGKFKGKATLTADESSSTAYMQLSSLASEDSAVYFCARRETTTVGRYYYAMDYWGQGTTVTVSSGGGGSGGSGSGGGGSASGSGDIQLTQSPASLAVSLGQRATISCKASQSVDYDGDSYLNWYQQIPGQPPKLLIYDASNLVSGIPPRFSGSGSGTDFTLNIHPVEKVDAATYHCQQSTEDPWTFGGGTKLEIKGGSSGEIVLTQSPATLSLSPGERATLSCRASQSVSSYLAWYQQKPGQAPRLLIYDASNRATGIPARFSGSGSGTDFTLTISSLEPEDFAVYYCQQRSNWPPTFGQGTKVEIKASGGSGDKTHTCPPCPAPEAAGGPSVFLFPPKPKDTLMISRTPEVTCVVVDVSHEDPEVKFNWYVDGVEVHNAKTKPREEQYNSTYRVVSVLTVLHQDWLNGKEYKCKVSNKALAAPIEKTISKAKGQPREPQVYTLPPCRDELTKNQVSLWCLVKGFYPSDIAVEWESNGQPENNYKTTPPVLDSDGSFFLYSKLTVDKSRWQQGNVFSCSVMHEALHNHYTQKSLSLSPG

SEQ ID NO: 79 - protein, 726 aa, synthetic construct
  REGION 1..726: note = Artificial Sequence
QVQLQQSGAELVRPGSSVKISCKASGYAFSSYWMNWVKQRPGQGLEWIGQIWPGDGDTNYNGKFKGKATLTADESSSTAYMQLSSLASEDSAVYFCARRETTTVGRYYYAMDYWGQGTTVTVSSGGSSGEVQLLESGGGLVQPGGSLRLSCAVSGFTFNSFAMSWVRQAPGKGLEWVSAISGSGGGTYYADSVKGRFTISRDNSKNTLYLQMNSLRAEDTAVYFCAKDKILWFGEPVFDYWGQGTLVTVSSGGGGSGGSGSGGGGSASGSGEIVLTQSPATLSLSPGERATLSCRASQSVSSYLAWYQQKPGQAPRLLIYDASNRATGIPARFSGSGSGTDFTLTISSLEPEDFAVYYCQQRSNWPPTFGQGTKVEIKGGSSGDIQLTQSPASLAVSLGQRATISCKASQSVDYDGDSYLNWYQQIPGQPPKLLIYDASNLVSGIPPRFSGSGSGTDFTLNIHPVEKVDAATYHCQQSTEDPWTFGGGTKLEIKASGGSGDKTHTCPPCPAPEAAGGPSVFLFPPKPKDTLMISRTPEVTCVVVDVSHEDPEVKFNWYVDGVEVHNAKTKPREEQYNSTYRVVSVLTVLHQDWLNGKEYKCKVSNKALAAPIEKTISKAKGQPREPQVYTLPPCRDELTKNQVSLWCLVKGFYPSDIAVEWESNGQPENNYKTTPPVLDSDGSFFLYSKLTVDKSRWQQGNVFSCSVMHEALHNHYTQKSLSLSPG

SEQ ID NO: 80 - DNA, 2118 bp, synthetic construct
  misc_feature 1..2118: note = Artificial Sequence
  source 1..2118: mol_type = other DNA
gacatccagatgacacagagccctagcagcctgtctgccagcgtgggagacagagtgaccatcacatgtcacgccagccagaacatctacgtgtggctgaactggtatcagcagaagcccggcaaggcccctaagctgctgatctacaaggccagcaatctgcacaccggcgtgcccagcagattttctggctctggcagcggcaccgacttcaccctgaccatatctagcctgcagcctgaggacttcgccacctactattgtcagcagggccagacatacccctacacctttggcggcggaacaaaggtggaaatcaagggagacatccagctgacacagagccctgccatcatgtctgctagccctggcgagaaagtgaccatgacctgtagagccagcagcagcgtgtcctacatgaactggtatcagcagaagtccggcacaagccccaagcggtggatctacgatacaagcaaggtggccagcggcgtgccctacagattttctggctctggcagcggcaccagctacagcctgacaatcagcagcatggaagccgaggatgccgccacctactactgccagcagtggtccagcaatcccctgacatttggagccggcaccaagctggaactgaagggaggcggaggatctggcggatctggaagtggcggcggtggatctgcttctggctctggcgacatcaagctgcagcagtctggcgccgaacttgctagacctggcgcctctgtgaagatgagctgcaagaccagcggctacaccttcaccagatacaccatgcactgggtcaagcagaggcctggacagggactcgagtggatcggctacatcaaccccagcagaggctacaccaactacaaccagaagttcaaggacaaggccacactgaccaccgacaagagcagcagcacagcctacatgcagctgagcagcctgaccagcgaagatagcgccgtgtactactgcgcccggtactacgacgatcactacagcctggattactggggccagggcacaaccctgacagtgtcatctggacaggttcagctggttcagtctggcgccgaagtgaagaaacctggcgcctctgtgaaggtgtcctgcaaggccagcggctacacctttaccagctactacatccactgggtccgacaggcccctggacaaggactggaatggatcggcagcatctaccccggcaacgtgaacaccaactacaacgagaagttcaaggaccgggccacactgaccgtggacacctctatcagcaccgcctacatggaactgagccggctgagatccgatgataccgccgtgtacttctgcaccagaagccactacggcctggactggaacttcgatgtgtggggccagggcaccaccgtgacagtttcttctgctagtggcggctccggagataagacccacacatgtcctccatgtcctgctccagaggctgctggtggcccttccgtgtttctgttccctccaaagcctaaggacaccctgatgatcagcaggacccctgaagtgacctgcgtggtggtggatgtgtctcacgaggacccagaagtgaagttcaattggtacgtggacggcgtggaagtgcacaacgccaagaccaagcctagagaggaacagtacaacagcacctacagagtggtgtccgtgctgaccgtgctgcaccaggattggctgaacggcaaagagtacaagtgcaaggtgtccaacaaggccctggccgctcctatcgagaaaaccatcagcaaggccaagggccagcctcgcgaacctcaagtctgtacactgcctcctagccgggacgagctgaccaagaatcaggtgtcactgagctgcgccgtgaagggcttttaccccagcgacattgccgtggaatgggagagcaatggccagccagagaacaactacaagacaacccctcctgtgctggacagcgacggctcatttttcctggtgtccaagctgacagtggacaagagcagatggcagcagggcaacgtgttcagctgcagcgtgatgcacgaggccctgcacaaccactacacccagaaaagcctgtctctgagccctggc

SEQ ID NO: 81 - DNA, 2172 bp, synthetic construct
  misc_feature 1..2172: note = Artificial Sequence
  source 1..2172: mol_type = other DNA
gacatccagatgacacagagccctagcagcctgtctgccagcgtgggagacagagtgaccatcacatgtcacgccagccagaacatctacgtgtggctgaactggtatcagcagaagcccggcaaggcccctaagctgctgatctacaaggccagcaatctgcacaccggcgtgcccagcagattttctggctctggcagcggcaccgacttcaccctgaccatatctagcctgcagcctgaggacttcgccacctactattgtcagcagggccagacatacccctacacctttggcggcggaacaaaggtggaaatcaagtctggcggaagtggatctagcggcggctctgacatccagctgacacagagccctgccatcatgtctgctagccctggcgagaaagtgaccatgacctgtagagccagcagcagcgtgtcctacatgaactggtatcagcagaagtccggcacaagccccaagcggtggatctacgatacaagcaaggtggccagcggcgtgccctacagattttctggctctggcagcggcaccagctacagcctgacaatcagcagcatggaagccgaggatgccgccacctactactgccagcagtggtccagcaatcccctgacatttggagccggcaccaagctggaactgaagggaggcggaggatctggcggatctggaagtggcggcggtggatctgcttctggctctggcgacatcaagctgcagcagtctggcgccgaacttgctagacctggcgcctctgtgaagatgagctgcaagaccagcggctacaccttcaccagatacaccatgcactgggtcaagcagaggcctggacagggactcgagtggatcggctacatcaaccccagcagaggctacaccaactacaaccagaagttcaaggacaaggccacactgaccaccgacaagagcagcagcacagcctacatgcagctgagcagcctgaccagcgaagatagcgccgtgtactactgcgcccggtactacgacgatcactacagcctggattactggggccagggcacaaccctgacagtgtcatctggtggaagcggcggaagctctggcagcagccaggttcagctggttcagtctggcgccgaagtgaagaaacctggcgcctctgtgaaggtgtcctgcaaggccagcggctacacctttaccagctactacatccactgggtccgacaggcccctggacaaggactggaatggatcggcagcatctaccccggcaacgtgaacaccaactacaacgagaagttcaaggaccgggccacactgaccgtggacacctctatcagcaccgcctacatggaactgagccggctgagatccgatgataccgccgtgtacttctgcaccagaagccactacggcctggactggaacttcgatgtgtggggccagggcaccaccgtgacagtttcttctgctagtggcggctccggagataagacccacacatgtcctccatgtcctgctccagaggctgctggtggcccttccgtgtttctgttccctccaaagcctaaggacaccctgatgatcagcaggacccctgaagtgacctgcgtggtggtggatgtgtctcacgaggacccagaagtgaagttcaattggtacgtggacggcgtggaagtgcacaacgccaagaccaagcctagagaggaacagtacaacagcacctacagagtggtgtccgtgctgaccgtgctgcaccaggattggctgaacggcaaagagtacaagtgcaaggtgtccaacaaggccctggccgctcctatcgagaaaaccatcagcaaggccaagggccagcctcgcgaacctcaagtctgtacactgcctcctagccgggacgagctgaccaagaatcaggtgtcactgagctgcgccgtgaagggcttttaccccagcgacattgccgtggaatgggagagcaatggccagccagagaacaactacaagacaacccctcctgtgctggacagcgacggctcatttttcctggtgtccaagctgacagtggacaagagcagatggcagcagggcaacgtgttcagctgcagcgtgatgcacgaggccctgcacaaccactacacccagaaaagcctgtctctgagccctggc

SEQ ID NO: 82 - DNA, 2154 bp, synthetic construct
  misc_feature 1..2154: note = Artificial Sequence
  source 1..2154: mol_type = other DNA
gacatccagctgacacagagccctgcttctctggccgtgtctctgggacagagagccaccatcagctgcaaggccagccagagcgttgactacgacggcgacagctacctgaactggtatcagcagatccccggccagcctcctaagctgctgatctacgatgccagcaacctggtgtctggcatccctcctagattttccggcagcggctctggcaccgacttcaccctgaatatccatcctgtggaaaaggtggacgccgccacctaccactgtcagcagagcacagaagatccctggacctttggcggaggcaccaagctggaaatcaagggagagatcgtgctgacacagtctcccgccacactgtcactgtctccaggcgaaagagccacactgagctgtagagccagccagagcgtgtcctcttacctggcctggtatcagcagaagcctggacaggctccccggctgctgatctacgatgccagcaatagagccacaggcatccccgccagattttctggctctggcagcggcaccgatttcaccctgaccataagcagcctggaacctgaggacttcgccgtgtactactgccagcagagaagcaactggcctcctacctttggccagggcaccaaggtggaaatcaagggaggcggaggatctggcggatctggaagtggcggcggtggatctgcttctggctctggcgaagtgcagctgctggaatctggcggaggactggttcaacctggcggctctctgagactgagctgtgccgtgtccggcttcaccttcaacagcttcgccatgagctgggtccgacaggcccctggaaaaggccttgaatgggtgtccgccatctctggaagcggcggaggcacatattacgccgactctgtgaagggcagattcaccatcagccgggacaacagcaagaacaccctgtacctgcagatgaacagcctgagagccgaggataccgccgtgtacttctgcgccaaggacaagatcctttggttcggcgagcccgtgttcgactattggggacagggaaccctggtcaccgtgtctagtggacaggttcagctgcagcagtctggcgccgaactcgttagacctggcagcagcgtgaagatcagctgcaaggccagcggctacgccttcagcagctactggatgaactgggtcaagcagaggcctggacagggcctcgagtggatcggacaaatttggcctggcgacggcgacaccaactacaacggcaagttcaagggcaaagccacactgaccgccgacgagtctagcagcacagcctacatgcagctgtctagcctggccagcgaagatagcgccgtgtacttctgtgccagacgggaaaccaccaccgtgggcagatattactacgccatggactactggggccagggcaccacagtgacagtctcttctgctagtggcggctccggagataagacccacacatgtcctccatgtcctgctccagaagctgccggcggaccttccgtgtttctgttccctccaaagcctaaggacaccctgatgatcagcaggacccctgaagtgacctgcgtggtggtggatgtgtctcacgaggacccagaagtgaagttcaattggtacgtggacggcgtggaagtgcacaacgccaagaccaagcctagagaggaacagtacaacagcacctacagagtggtgtccgtgctgacagtgctgcaccaggattggctgaacggcaaagagtacaagtgcaaggtgtccaacaaggccctggctgcccctatcgagaaaaccatcagcaaggccaagggccagcctagggaaccccaggtttacacccttcctccatgccgggatgagctgaccaagaaccaggtgtccctgtggtgtctggtcaagggcttctaccccagcgacattgccgtggaatgggagagcaatggccagcctgagaacaactacaagaccacacctcctgtgctggactccgacggatcattcttcctgtacagcaagctgactgtggacaagagcagatggcagcagggcaacgtgttcagctgcagcgtgatgcacgaggccctgcacaaccactacacacagaagtccctgtctctgagccctggc

SEQ ID NO: 83 - DNA, 2208 bp, synthetic construct
  misc_feature 1..2208: note = Artificial Sequence
  source 1..2208: mol_type = other DNA
gacatccagctgacacagagccctgcttctctggccgtgtctctgggacagagagccaccatcagctgcaaggccagccagagcgttgactacgacggcgacagctacctgaactggtatcagcagatccccggccagcctcctaagctgctgatctacgatgccagcaacctggtgtctggcatccctcctagattttccggcagcggctctggcaccgacttcaccctgaatatccatcctgtggaaaaggtggacgccgccacctaccactgtcagcagagcacagaagatccctggacctttggcggaggcaccaagctggaaatcaagtctggcggaagtggatctagcggcggctctgagatcgtgctgacacagtctcccgccacactgtcactgtctccaggcgaaagagccacactgagctgtagagccagccagagcgtgtcctcttacctggcctggtatcagcagaagcctggacaggctccccggctgctgatctacgatgccagcaatagagccacaggcatccccgccagattttctggctctggcagcggcaccgatttcaccctgaccataagcagcctggaacctgaggacttcgccgtgtactactgccagcagagaagcaactggcctcctacctttggccagggcaccaaggtggaaatcaagggaggcggaggatctggcggatctggaagtggcggcggtggatctgcttctggctctggcgaagtgcagctgctggaatctggcggaggactggttcaacctggcggctctctgagactgagctgtgccgtgtccggcttcaccttcaacagcttcgccatgagctgggtccgacaggcccctggaaaaggccttgaatgggtgtccgccatctctggaagcggcggaggcacatattacgccgactctgtgaagggcagattcaccatcagccgggacaacagcaagaacaccctgtacctgcagatgaacagcctgagagccgaggataccgccgtgtacttctgcgccaaggacaagatcctttggttcggcgagcccgtgttcgactattggggacagggaaccctggtcaccgtgtctagtggtggaagcggcggaagctctggcagcagccaggttcagctgcagcagtctggcgccgaactcgttagacctggcagcagcgtgaagatcagctgcaaggccagcggctacgccttcagcagctactggatgaactgggtcaagcagaggcctggacagggcctcgagtggatcggacaaatttggcctggcgacggcgacaccaactacaacggcaagttcaagggcaaagccacactgaccgccgacgagtctagcagcacagcctacatgcagctgtctagcctggccagcgaagatagcgccgtgtacttctgtgccagacgggaaaccaccaccgtgggcagatattactacgccatggactactggggccagggcaccacagtgacagtctcttctgctagtggcggctccggagataagacccacacatgtcctccatgtcctgctccagaagctgccggcggaccttccgtgtttctgttccctccaaagcctaaggacaccctgatgatcagcaggacccctgaagtgacctgcgtggtggtggatgtgtctcacgaggacccagaagtgaagttcaattggtacgtggacggcgtggaagtgcacaacgccaagaccaagcctagagaggaacagtacaacagcacctacagagtggtgtccgtgctgacagtgctgcaccaggattggctgaacggcaaagagtacaagtgcaaggtgtccaacaaggccctggctgcccctatcgagaaaaccatcagcaaggccaagggccagcctagggaaccccaggtttacacccttcctccatgccgggatgagctgaccaagaaccaggtgtccctgtggtgtctggtcaagggcttctaccccagcgacattgccgtggaatgggagagcaatggccagcctgagaacaactacaagaccacacctcctgtgctggactccgacggatcattcttcctgtacagcaagctgactgtggacaagagcagatggcagcagggcaacgtgttcagctgcagcgtgatgcacgaggccctgcacaaccactacacacagaagtccctgtctctgagccctggc

SEQ ID NO: 84 - DNA, 2433 bp, synthetic construct
  misc_feature 1..2433: note = Artificial Sequence
  source 1..2433: mol_type = other DNA
gacatccagatgacacagagccctagcagcctgtctgccagcgtgggagacagagtgaccatcacatgtcacgccagccagaacatctacgtgtggctgaactggtatcagcagaagcccggcaaggcccctaagctgctgatctacaaggccagcaatctgcacaccggcgtgcccagcagattttctggctctggcagcggcaccgacttcaccctgaccatatctagcctgcagcctgaggacttcgccacctactattgtcagcagggccagacatacccctacacctttggcggcggaacaaaggtggaaatcaagggcggatcttctggagacatccagctgacacagagccctgccatcatgtctgctagccctggcgagaaagtgaccatgacctgtagagccagcagcagcgtgtcctacatgaactggtatcagcagaagtccggcacaagccccaagcggtggatctacgatacaagcaaggtggccagcggcgtgccctacagattttctggctctggcagcggcaccagctacagcctgacaatcagcagcatggaagccgaggatgccgccacctactactgccagcagtggtccagcaatcccctgacatttggagccggcaccaagctggaactgaagggaggcggaggatctggcggatctggaagtggcggcggtggatctgcttctggctctggcgacatcaagctgcagcagtctggcgccgaacttgctagacctggcgcctctgtgaagatgagctgcaagaccagcggctacaccttcaccagatacaccatgcactgggtcaagcagaggcctggacagggactcgagtggatcggctacatcaaccccagcagaggctacaccaactacaaccagaagttcaaggacaaggccacactgaccaccgacaagagcagcagcacagcctacatgcagctgagcagcctgaccagcgaagatagcgccgtgtactactgcgcccggtactacgacgatcactacagcctggattactggggccagggcacaaccctgacagtgtcatctggaggcagctctggccaggttcagctggttcagtctggcgccgaagtgaagaaacctggcgcctctgtgaaggtgtcctgcaaggccagcggctacacctttaccagctactacatccactgggtccgacaggcccctggacaaggactggaatggatcggcagcatctaccccggcaacgtgaacaccaactacaacgagaagttcaaggaccgggccacactgaccgtggacacctctatcagcaccgcctacatggaactgagccggctgagatccgatgataccgccgtgtacttctgcaccagaagccactacggcctggactggaacttcgatgtgtggggccagggcaccaccgtgacagtttcttctgcttcgaccaagggcccatccgtgtttcctctggctcccagcagcaagtctacaagcggaggaacagccgctctgggctgcctggtcaaggattactttcccgagcctgtgaccgtgtcctggaattctggcgctctgacaagcggcgtgcacacctttccagctgtgctgcaaagcagcggcctgtactctctgagcagcgtggtcacagtgcctagctctagcctgggcacccagacctacatctgcaatgtgaaccacaagcctagcaacaccaaggtggacaagaaggtggaacccaagagctgcgataagacccacacatgtcctccatgtcctgctccagaggctgctggtggcccttccgtgtttctgttccctccaaagcctaaggacaccctgatgatcagcaggacccctgaagtgacctgcgtggtggtggatgtgtctcacgaggacccagaagtgaagttcaattggtacgtggacggcgtggaagtgcacaacgccaagaccaagcctagagaggaacagtacaacagcacctacagagtggtgtccgtgctgaccgtgctgcaccaggattggctgaacggcaaagagtacaagtgcaaggtgtccaacaaggccctggccgctcctatcgagaaaaccatcagcaaggccaagggccagcctcgcgaacctcaagtctgtacactgcctcctagccgggacgagctgaccaagaatcaggtgtcactgagctgcgccgtgaagggcttttaccccagcgacattgccgtggaatgggagagcaatggccagccagagaacaactacaagacaacccctcctgtgctggacagcgacggctcatttttcctggtgtccaagctgacagtggacaagagcagatggcagcagggcaacgtgttcagctgcagcgtgatgcacgaggccctgcacaaccactacacccagaaaagcctgtctctgagccctggc

SEQ ID NO: 85 - DNA, 2481 bp, synthetic construct
  misc_feature 1..2481: note = Artificial Sequence
  source 1..2481: mol_type = other DNA
gacatccagctgacacagagccctgcttctctggccgtgtctctgggacagagagccaccatcagctgcaaggccagccagagcgttgactacgacggcgacagctacctgaactggtatcagcagatccccggccagcctcctaagctgctgatctacgatgccagcaacctggtgtctggcatccctcctagattttccggcagcggctctggcaccgacttcaccctgaatatccatcctgtggaaaaggtggacgccgccacctaccactgtcagcagagcacagaagatccctggacctttggcggaggcaccaagctggaaatcaagggcggatcttctggagagatcgtgctgacacagtctcccgccacactgtcactgtctccaggcgaaagagccacactgagctgtagagccagccagagcgtgtcctcttacctggcctggtatcagcagaagcctggacaggctccccggctgctgatctacgatgccagcaatagagccacaggcatccccgccagattttctggctctggcagcggcaccgatttcaccctgaccataagcagcctggaacctgaggacttcgccgtgtactactgccagcagagaagcaactggcctcctacctttggccagggcaccaaggtggaaatcaagggaggcggaggatctggcggatctggaagtggcggcggtggatctgcttctggctctggcgaagtgcagctgctggaatctggcggaggactggttcaacctggcggctctctgagactgagctgtgccgtgtccggcttcaccttcaacagcttcgccatgagctgggtccgacaggcccctggaaaaggccttgaatgggtgtccgccatctctggaagcggcggaggcacatattacgccgactctgtgaagggcagattcaccatcagccgggacaacagcaagaacaccctgtacctgcagatgaacagcctgagagccgaggataccgccgtgtacttctgcgccaaggacaagatcctttggttcggcgagcccgtgttcgactattggggacagggaaccctggtcaccgtgtctagtggaggcagctctggccaggttcagctgcagcagtctggcgccgaactcgttagacctggcagcagcgtgaagatcagctgcaaggccagcggctacgccttcagcagctactggatgaactgggtcaagcagaggcctggacagggcctcgagtggatcggacaaatttggcctggcgacggcgacaccaactacaacggcaagttcaagggcaaagccacactgaccgccgacgagtctagcagcacagcctacatgcagctgtctagcctggccagcgaagatagcgccgtgtacttctgtgccagacgggaaaccaccaccgtgggcagatattactacgccatggactactggggccagggcaccacagtgacagtctcttctgctacagtggccgctcccagcgtgttcatcttcccacctagcgacgagcagctgaagtccggcacagcctctgtcgtgtgcctgctgaacaacttctacccccgcgaggccaaagtgcagtggaaggtggacaacgccctgcagagcggcaacagccaggaaagcgtgaccgagcaggacagcaaggactccacctacagcctgagcagcaccctgacactgagcaaggccgactacgagaagcacaaggtgtacgcctgcgaagtgacccaccagggcctgtctagccccgtgaccaagagcttcaaccggggcgagtgtgataagacccacacatgtcctccatgtcctgctccagaagctgccggcggaccttccgtgtttctgttccctccaaagcctaaggacaccctgatgatcagcaggacccctgaagtgacctgcgtggtggtggatgtgtctcacgaggacccagaagtgaagttcaattggtacgtggacggcgtggaagtgcacaacgccaagaccaagcctagagaggaacagtacaacagcacctacagagtggtgtccgtgctgacagtgctgcaccaggattggctgaacggcaaagagtacaagtgcaaggtgtccaacaaggccctggctgcccctatcgagaaaaccatcagcaaggccaagggccagcctagggaaccccaggtttacacccttcctccatgccgggatgagctgaccaagaaccaggtgtccctgtggtgtctggtcaagggcttctaccccagcgacattgccgtggaatgggagagcaatggccagcctgagaacaactacaagaccacacctcctgtgctggactccgacggatcattcttcctgtacagcaagctgactgtggacaagagcagatggcagcagggcaacgtgttcagctgcagcgtgatgcacgaggccctgcacaaccactacacacagaagtccctgtctctgagccctggc

SEQ ID NO: 86 - DNA, 2433 bp, synthetic construct
  misc_feature 1..2433: note = Artificial Sequence
  source 1..2433: mol_type = other DNA
gacatccagatgacacagagccctagcagcctgtctgccagcgtgggagacagagtgaccatcacatgtcacgccagccagaacatctacgtgtggctgaactggtatcagcagaagcccggcaaggcccctaagctgctgatctacaaggccagcaatctgcacaccggcgtgcccagcagattttctggctctggcagcggcaccgacttcaccctgaccatatctagcctgcagcctgaggacttcgccacctactattgtcagcagggccagacatacccctacacctttggcggcggaacaaaggtggaaatcaagggcggatcttctggagacatccagctgacacagagccctgccatcatgtctgctagccctggcgagaaagtgaccatgacctgtagagccagcagcagcgtgtcctacatgaactggtatcagcagaagtccggcacaagccccaagcggtggatctacgatacaagcaaggtggccagcggcgtgccctacagattttctggctctggcagcggcaccagctacagcctgacaatcagcagcatggaagccgaggatgccgccacctactactgccagcagtggtccagcaatcccctgacatttggagccggcaccaagctggaactgaagggaggcggaggatctggcggatctggaagtggcggcggtggatctgcttctggctctggcgacatcaagctgcagcagtctggcgccgaacttgctagacctggcgcctctgtgaagatgagctgcaagaccagcggctacaccttcaccagatacaccatgcactgggtcaagcagaggcctggacagggactcgagtggatcggctacatcaaccccagcagaggctacaccaactacaaccagaagttcaaggacaaggccacactgaccaccgacaagagcagcagcacagcctacatgcagctgagcagcctgaccagcgaagatagcgccgtgtactactgcgcccggtactacgacgatcactacagcctggattactggggccagggcacaaccctgacagtgtcatctggaggcagctctggccaggttcagctggttcagtctggcgccgaagtgaagaaacctggcgcctctgtgaaggtgtcctgcaaggccagcggctacacctttaccagctactacatccactgggtccgacaggcccctggacaaggactggaatggatcggcagcatctaccccggcaacgtgaacaccaactacaacgagaagttcaaggaccgggccacactgaccgtggacacctctatcagcaccgcctacatggaactgagccggctgagatccgatgataccgccgtgtacttctgcaccagaagccactacggcctggactggaacttcgatgtgtggggccagggcaccaccgtgacagtttcttctgcttcgaccaagggcccatccgtgtttcctctggctcccagcagcaagtctacaagcggaggaacagccgctctgggctgcctggtcaaggattactttcccgagcctgtgaccgtgtcctggaattctggcgctctgacaagcggcgtgcacacctttccagctgtgctgcaaagcagcggcctgtactctctgagcagcgtggtcacagtgcctagctctagcctgggcacccagacctacatctgcaatgtgaaccacaagcctagcaacaccaaggtggacaagaaggtggaacccaagagcagtgataagacccacacatgtcctccatgtcctgctccagaggctgctggtggcccttccgtgtttctgttccctccaaagcctaaggacaccctgatgatcagcaggacccctgaagtgacctgcgtggtggtggatgtgtctcacgaggacccagaagtgaagttcaattggtacgtggacggcgtggaagtgcacaacgccaagaccaagcctagagaggaacagtacaacagcacctacagagtggtgtccgtgctgaccgtgctgcaccaggattggctgaacggcaaagagtacaagtgcaaggtgtccaacaaggccctggccgctcctatcgagaaaaccatcagcaaggccaagggccagcctcgcgaacctcaagtctgtacactgcctcctagccgggacgagctgaccaagaatcaggtgtcactgagctgcgccgtgaagggcttttaccccagcgacattgccgtggaatgggagagcaatggccagccagagaacaactacaagacaacccctcctgtgctggacagcgacggctcatttttcctggtgtccaagctgacagtggacaagagcagatggcagcagggcaacgtgttcagctgcagcgtgatgcacgaggccctgcacaaccactacacccagaaaagcctgtctctgagccctggc

SEQ ID NO: 87 - DNA, 2481 bp, synthetic construct
  misc_feature 1..2481: note = Artificial Sequence
  source 1..2481: mol_type = other DNA
gacatccagctgacacagagccctgcttctctggccgtgtctctgggacagagagccaccatcagctgcaaggccagccagagcgttgactacgacggcgacagctacctgaactggtatcagcagatccccggccagcctcctaagctgctgatctacgatgccagcaacctggtgtctggcatccctcctagattttccggcagcggctctggcaccgacttcaccctgaatatccatcctgtggaaaaggtggacgccgccacctaccactgtcagcagagcacagaagatccctggacctttggcggaggcaccaagctggaaatcaagggcggatcttctggagagatcgtgctgacacagtctcccgccacactgtcactgtctccaggcgaaagagccacactgagctgtagagccagccagagcgtgtcctcttacctggcctggtatcagcagaagcctggacaggctccccggctgctgatctacgatgccagcaatagagccacaggcatccccgccagattttctggctctggcagcggcaccgatttcaccctgaccataagcagcctggaacctgaggacttcgccgtgtactactgccagcagagaagcaactggcctcctacctttggccagggcaccaaggtggaaatcaagggaggcggaggatctggcggatctggaagtggcggcggtggatctgcttctggctctggcgaagtgcagctgctggaatctggcggaggactggttcaacctggcggctctctgagactgagctgtgccgtgtccggcttcaccttcaacagcttcgccatgagctgggtccgacaggcccctggaaaaggccttgaatgggtgtccgccatctctggaagcggcggaggcacatattacgccgactctgtgaagggcagattcaccatcagccgggacaacagcaagaacaccctgtacctgcagatgaacagcctgagagccgaggataccgccgtgtacttctgcgccaaggacaagatcctttggttcggcgagcccgtgttcgactattggggacagggaaccctggtcaccgtgtctagtggaggcagctctggccaggttcagctgcagcagtctggcgccgaactcgttagacctggcagcagcgtgaagatcagctgcaaggccagcggctacgccttcagcagctactggatgaactgggtcaagcagaggcctggacagggcctcgagtggatcggacaaatttggcctggcgacggcgacaccaactacaacggcaagttcaagggcaaagccacactgaccgccgacgagtctagcagcacagcctacatgcagctgtctagcctggccagcgaagatagcgccgtgtacttctgtgccagacgggaaaccaccaccgtgggcagatattactacgccatggactactggggccagggcaccacagtgacagtctcttctgctacagtggccgctcccagcgtgttcatcttcccacctagcgacgagcagctgaagtccggcacagcctctgtcgtgtgcctgctgaacaacttctacccccgcgaggccaaagtgcagtggaaggtggacaacgccctgcagagcggcaacagccaggaaagcgtgaccgagcaggacagcaaggactccacctacagcctgagcagcaccctgacactgagcaaggccgactacgagaagcacaaggtgtacgcctgcgaagtgacccaccagggcctgtctagccccgtgaccaagagcttcaaccggggcgagagcgataagacccacacatgtcctccatgtcctgctccagaagctgccggcggaccttccgtgtttctgttccctccaaagcctaaggacaccctgatgatcagcaggacccctgaagtgacctgcgtggtggtggatgtgtctcacgaggacccagaagtgaagttcaattggtacgtggacggcgtggaagtgcacaacgccaagaccaagcctagagaggaacagtacaacagcacctacagagtggtgtccgtgctgacagtgctgcaccaggattggctgaacggcaaagagtacaagtgcaaggtgtccaacaaggccctggctgcccctatcgagaaaaccatcagcaaggccaagggccagcctagggaaccccaggtttacacccttcctccatgccgggatgagctgaccaagaaccaggtgtccctgtggtgtctggtcaagggcttctaccccagcgacattgccgtggaatgggagagcaatggccagcctgagaacaactacaagaccacacctcctgtgctggactccgacggatcattcttcctgtacagcaagctgactgtggacaagagcagatggcagcagggcaacgtgttcagctgcagcgtgatgcacgaggccctgcacaaccactacacacagaagtccctgtctctgagccctggc

SEQ ID NO: 88 - DNA, 2439 bp, synthetic construct
  misc_feature 1..2439: note = Artificial Sequence
  source 1..2439: mol_type = other DNA
gacatccagatgacacagagccctagcagcctgtctgccagcgtgggagacagagtgaccatcacatgtcacgccagccagaacatctacgtgtggctgaactggtatcagcagaagcccggcaaggcccctaagctgctgatctacaaggccagcaatctgcacaccggcgtgcccagcagattttctggctctggcagcggcaccgacttcaccctgaccatatctagcctgcagcctgaggacttcgccacctactattgtcagcagggccagacatacccctacacctttggcggcggaacaaaggtggaaatcaagggcggatcttctggagacatccagctgacacagagccctgccatcatgtctgctagccctggcgagaaagtgaccatgacctgtagagccagcagcagcgtgtcctacatgaactggtatcagcagaagtccggcacaagccccaagcggtggatctacgatacaagcaaggtggccagcggcgtgccctacagattttctggctctggcagcggcaccagctacagcctgacaatcagcagcatggaagccgaggatgccgccacctactactgccagcagtggtccagcaatcccctgacatttggagccggcaccaagctggaactgaagggaggcggaggatctggcggatctggaagtggcggcggtggatctgcttctggctctggcgacatcaagctgcagcagtctggcgccgaacttgctagacctggcgcctctgtgaagatgagctgcaagaccagcggctacaccttcaccagatacaccatgcactgggtcaagcagaggcctggacagggactcgagtggatcggctacatcaaccccagcagaggctacaccaactacaaccagaagttcaaggacaaggccacactgaccaccgacaagagcagcagcacagcctacatgcagctgagcagcctgaccagcgaagatagcgccgtgtactactgcgcccggtactacgacgatcactacagcctggattactggggccagggcacaaccctgacagtgtcatctggaggcagctctggccaggttcagctggttcagtctggcgccgaagtgaagaaacctggcgcctctgtgaaggtgtcctgcaaggccagcggctacacctttaccagctactacatccactgggtccgacaggcccctggacaaggactggaatggatcggcagcatctaccccggcaacgtgaacaccaactacaacgagaagttcaaggaccgggccacactgaccgtggacacctctatcagcaccgcctacatggaactgagccggctgagatccgatgataccgccgtgtacttctgcaccagaagccactacggcctggactggaacttcgatgtgtggggccagggcaccaccgtgacagtttcttctgcttcgaccaagggcccatccgtgtttcctctggctcccagcagcaagtctacaagcggaggaacagccgctctgggctgcctggtcaaggattactttcccgagcctgtgaccgtgtcctggaattctggcgctctgacaagcggcgtgcacacctttccagctgtgctgcaaagcagcggcctgtactctctgagcagcgtggtcacagtgcctagctctagcctgggcacccagacctacatctgcaatgtgaaccacaagcctagcaacaccaaggtggacaagaaggtggaacccaagacacctctgggagatactacccacacatgtcctccatgtcctgctccagaggctgctggtggcccttccgtgtttctgttccctccaaagcctaaggacaccctgatgatcagcaggacccctgaagtgacctgcgtggtggtggatgtgtctcacgaggacccagaagtgaagttcaattggtacgtggacggcgtggaagtgcacaacgccaagaccaagcctagagaggaacagtacaacagcacctacagagtggtgtccgtgctgaccgtgctgcaccaggattggctgaacggcaaagagtacaagtgcaaggtgtccaacaaggccctggccgctcctatcgagaaaaccatcagcaaggccaagggccagcctcgcgaacctcaagtctgtacactgcctcctagccgggacgagctgaccaagaatcaggtgtcactgagctgcgccgtgaagggcttttaccccagcgacattgccgtggaatgggagagcaatggccagccagagaacaactacaagacaacccctcctgtgctggacagcgacggctcatttttcctggtgtccaagctgacagtggacaagagcagatggcagcagggcaacgtgttcagctgcagcgtgatgcacgaggccctgcacaaccactacacccagaaaagcctgtctctgagccctggc

SEQ ID NO: 89 - DNA, 2490 bp, synthetic construct
  misc_feature 1..2490: note = Artificial Sequence
  source 1..2490: mol_type = other DNA
gacatccagctgacacagagccctgcttctctggccgtgtctctgggacagagagccaccatcagctgcaaggccagccagagcgttgactacgacggcgacagctacctgaactggtatcagcagatccccggccagcctcctaagctgctgatctacgatgccagcaacctggtgtctggcatccctcctagattttccggcagcggctctggcaccgacttcaccctgaatatccatcctgtggaaaaggtggacgccgccacctaccactgtcagcagagcacagaagatccctggacctttggcggaggcaccaagctggaaatcaagggcggatcttctggagagatcgtgctgacacagtctcccgccacactgtcactgtctccaggcgaaagagccacactgagctgtagagccagccagagcgtgtcctcttacctggcctggtatcagcagaagcctggacaggctccccggctgctgatctacgatgccagcaatagagccacaggcatccccgccagattttctggctctggcagcggcaccgatttcaccctgaccataagcagcctggaacctgaggacttcgccgtgtactactgccagcagagaagcaactggcctcctacctttggccagggcaccaaggtggaaatcaagggaggcggaggatctggcggatctggaagtggcggcggtggatctgcttctggctctggcgaagtgcagctgctggaatctggcggaggactggttcaacctggcggctctctgagactgagctgtgccgtgtccggcttcaccttcaacagcttcgccatgagctgggtccgacaggcccctggaaaaggccttgaatgggtgtccgccatctctggaagcggcggaggcacatattacgccgactctgtgaagggcagattcaccatcagccgggacaacagcaagaacaccctgtacctgcagatgaacagcctgagagccgaggataccgccgtgtacttctgcgccaaggacaagatcctttggttcggcgagcccgtgttcgactattggggacagggaaccctggtcaccgtgtctagtggaggcagctctggccaggttcagctgcagcagtctggcgccgaactcgttagacctggcagcagcgtgaagatcagctgcaaggccagcggctacgccttcagcagctactggatgaactgggtcaagcagaggcctggacagggcctcgagtggatcggacaaatttggcctggcgacggcgacaccaactacaacggcaagttcaagggcaaagccacactgaccgccgacgagtctagcagcacagcctacatgcagctgtctagcctggccagcgaagatagcgccgtgtacttctgtgccagacgggaaaccaccaccgtgggcagatattactacgccatggactactggggccagggcaccacagtgacagtctcttctgctacagtggccgctcccagcgtgttcatcttcccacctagcgacgagcagctgaagtccggcacagcctctgtcgtgtgcctgctgaacaacttctacccccgcgaggccaaagtgcagtggaaggtggacaacgccctgcagagcggcaacagccaggaaagcgtgaccgagcaggacagcaaggactccacctacagcctgagcagcaccctgacactgagcaaggccgactacgagaagcacaaggtgtacgcctgcgaagtgacccaccagggcctgtctagccccgtgaccaagagcttcaaccggggcgagacacctctgggagatactacccacacatgtcctccatgtcctgctccagaagctgccggcggaccttccgtgtttctgttccctccaaagcctaaggacaccctgatgatcagcaggacccctgaagtgacctgcgtggtggtggatgtgtctcacgaggacccagaagtgaagttcaattggtacgtggacggcgtggaagtgcacaacgccaagaccaagcctagagaggaacagtacaacagcacctacagagtggtgtccgtgctgacagtgctgcaccaggattggctgaacggcaaagagtacaagtgcaaggtgtccaacaaggccctggctgcccctatcgagaaaaccatcagcaaggccaagggccagcctagggaaccccaggtttacacccttcctccatgccgggatgagctgaccaagaaccaggtgtccctgtggtgtctggtcaagggcttctaccccagcgacattgccgtggaatgggagagcaatggccagcctgagaacaactacaagaccacacctcctgtgctggactccgacggatcattcttcctgtacagcaagctgactgtggacaagagcagatggcagcagggcaacgtgttcagctgcagcgtgatgcacgaggccctgcacaaccactacacacagaagtccctgtctctgagccctggc

SEQ ID NO: 90 - DNA, 2442 bp, synthetic construct
  misc_feature 1..2442: note = Artificial Sequence
  source 1..2442: mol_type = other DNA
gacatccagatgacacagagccctagcagcctgtctgccagcgtgggagacagagtgaccatcacatgtcacgccagccagaacatctacgtgtggctgaactggtatcagcagaagcccggcaaggcccctaagctgctgatctacaaggccagcaatctgcacaccggcgtgcccagcagattttctggctctggcagcggcaccgacttcaccctgaccatatctagcctgcagcctgaggacttcgccacctactattgtcagcagggccagacatacccctacacctttggcggcggaacaaaggtggaaatcaagggcggatcttctggagacatccagctgacacagagccctgccatcatgtctgctagccctggcgagaaagtgaccatgacctgtagagccagcagcagcgtgtcctacatgaactggtatcagcagaagtccggcacaagccccaagcggtggatctacgatacaagcaaggtggccagcggcgtgccctacagattttctggctctggcagcggcaccagctacagcctgacaatcagcagcatggaagccgaggatgccgccacctactactgccagcagtggtccagcaatcccctgacatttggagccggcaccaagctggaactgaagggaggcggaggatctggcggatctggaagtggcggcggtggatctgcttctggctctggcgacatcaagctgcagcagtctggcgccgaacttgctagacctggcgcctctgtgaagatgagctgcaagaccagcggctacaccttcaccagatacaccatgcactgggtcaagcagaggcctggacagggactcgagtggatcggctacatcaaccccagcagaggctacaccaactacaaccagaagttcaaggacaaggccacactgaccaccgacaagagcagcagcacagcctacatgcagctgagcagcctgaccagcgaagatagcgccgtgtactactgcgcccggtactacgacgatcactacagcctggattactggggccagggcacaaccctgacagtgtcatctggaggcagctctggccaggttcagctggttcagtctggcgccgaagtgaagaaacctggcgcctctgtgaaggtgtcctgcaaggccagcggctacacctttaccagctactacatccactgggtccgacaggcccctggacaaggactggaatggatcggcagcatctaccccggcaacgtgaacaccaactacaacgagaagttcaaggaccgggccacactgaccgtggacacctctatcagcaccgcctacatggaactgagccggctgagatccgatgataccgccgtgtacttctgcaccagaagccactacggcctggactggaacttcgatgtgtggggccagggcaccaccgtgacagtttcttctggatcttccgcttcgaccaagggcccatccgtgtttcctctggctcccagcagcaagtctacaagcggaggaacagccgctctgggctgcctggtcaaggattactttcccgagcctgtgaccgtgtcctggaattctggcgctctgacaagcggcgtgcacacctttccagctgtgctgcaaagcagcggcctgtactctctgagcagcgtggtcacagtgcctagctctagcctgggcacccagacctacatctgcaatgtgaaccacaagcctagcaacaccaaggtggacaagaaggtggaacccaagagctgcgataagacccacacatgtcctccatgtcctgctccagaggctgctggtggcccttccgtgtttctgttccctccaaagcctaaggacaccctgatgatcagcaggacccctgaagtgacctgcgtggtggtggatgtgtctcacgaggacccagaagtgaagttcaattggtacgtggacggcgtggaagtgcacaacgccaagaccaagcctagagaggaacagtacaacagcacctacagagtggtgtccgtgctgaccgtgctgcaccaggattggctgaacggcaaagagtacaagtgcaaggtgtccaacaaggccctggccgctcctatcgagaaaaccatcagcaaggccaagggccagcctcgcgaacctcaagtctgtacactgcctcctagccgggacgagctgaccaagaatcaggtgtcactgagctgcgccgtgaagggcttttaccccagcgacattgccgtggaatgggagagcaatggccagccagagaacaactacaagacaacccctcctgtgctggacagcgacggctcatttttcctggtgtccaagctgacagtggacaagagcagatggcagcagggcaacgtgttcagctgcagcgtgatgcacgaggccctgcacaaccactacacccagaaaagcctgtctctgagccctggc

SEQ ID NO: 91 - DNA, 2487 bp, synthetic construct
  misc_feature 1..2487: note = Artificial Sequence
  source 1..2487: mol_type = other DNA
gacatccagctgacacagagccctgcttctctggccgtgtctctgggacagagagccaccatcagctgcaaggccagccagagcgttgactacgacggcgacagctacctgaactggtatcagcagatccccggccagcctcctaagctgctgatctacgatgccagcaacctggtgtctggcatccctcctagattttccggcagcggctctggcaccgacttcaccctgaatatccatcctgtggaaaaggtggacgccgccacctaccactgtcagcagagcacagaagatccctggacctttggcggaggcaccaagctggaaatcaagggcggatcttctggagagatcgtgctgacacagtctcccgccacactgtcactgtctccaggcgaaagagccacactgagctgtagagccagccagagcgtgtcctcttacctggcctggtatcagcagaagcctggacaggctccccggctgctgatctacgatgccagcaatagagccacaggcatccccgccagattttctggctctggcagcggcaccgatttcaccctgaccataagcagcctggaacctgaggacttcgccgtgtactactgccagcagagaagcaactggcctcctacctttggccagggcaccaaggtggaaatcaagggaggcggaggatctggcggatctggaagtggcggcggtggatctgcttctggctctggcgaagtgcagctgctggaatctggcggaggactggttcaacctggcggctctctgagactgagctgtgccgtgtccggcttcaccttcaacagcttcgccatgagctgggtccgacaggcccctggaaaaggccttgaatgggtgtccgccatctctggaagcggcggaggcacatattacgccgactctgtgaagggcagattcaccatcagccgggacaacagcaagaacaccctgtacctgcagatgaacagcctgagagccgaggataccgccgtgtacttctgcgccaaggacaagatcctttggttcggcgagcccgtgttcgactattggggacagggaaccctggtcaccgtgtctagtggaggcagctctggccaggttcagctgcagcagtctggcgccgaactcgttagacctggcagcagcgtgaagatcagctgcaaggccagcggctacgccttcagcagctactggatgaactgggtcaagcagaggcctggacagggcctcgagtggatcggacaaatttggcctggcgacggcgacaccaactacaacggcaagttcaagggcaaagccacactgaccgccgacgagtctagcagcacagcctacatgcagctgtctagcctggccagcgaagatagcgccgtgtacttctgtgccagacgggaaaccaccaccgtgggcagatattactacgccatggactactggggccagggcaccacagtgacagtctcttctgcctccggcacagtggccgctcccagcgtgttcatcttcccacctagcgacgagcagctgaagtccggcacagcctctgtcgtgtgcctgctgaacaacttctacccccgcgaggccaaagtgcagtggaaggtggacaacgccctgcagagcggcaacagccaggaaagcgtgaccgagcaggacagcaaggactccacctacagcctgagcagcaccctgacactgagcaaggccgactacgagaagcacaaggtgtacgcctgcgaagtgacccaccagggcctgtctagccccgtgaccaagagcttcaaccggggcgagtgtgataagacccacacatgtcctccatgtcctgctccagaagctgccggcggaccttccgtgtttctgttccctccaaagcctaaggacaccctgatgatcagcaggacccctgaagtgacctgcgtggtggtggatgtgtctcacgaggacccagaagtgaagttcaattggtacgtggacggcgtggaagtgcacaacgccaagaccaagcctagagaggaacagtacaacagcacctacagagtggtgtccgtgctgacagtgctgcaccaggattggctgaacggcaaagagtacaagtgcaaggtgtccaacaaggccctggctgcccctatcgagaaaaccatcagcaaggccaagggccagcctagggaaccccaggtttacacccttcctccatgccgggatgagctgaccaagaaccaggtgtccctgtggtgtctggtcaagggcttctaccccagcgacattgccgtggaatgggagagcaatggccagcctgagaacaactacaagaccacacctcctgtgctggactccgacggatcattcttcctgtacagcaagctgactgtggacaagagcagatggcagcagggcaacgtgttcagctgcagcgtgatgcacgaggccctgcacaaccactacacacagaagtccctgtctctgagccctggc

SEQ ID NO: 92 - DNA, 2448 bp, synthetic construct
  misc_feature 1..2448: note = Artificial Sequence
  source 1..2448: mol_type = other DNA
gacatccagatgacacagagccctagcagcctgtctgccagcgtgggagacagagtgaccatcacatgtcacgccagccagaacatctacgtgtggctgaactggtatcagcagaagcccggcaaggcccctaagctgctgatctacaaggccagcaatctgcacaccggcgtgcccagcagattttctggctctggcagcggcaccgacttcaccctgaccatatctagcctgcagcctgaggacttcgccacctactattgtcagcagggccagacatacccctacacctttggcggcggaacaaaggtggaaatcaagggcggatcttctggagacatccagctgacacagagccctgccatcatgtctgctagccctggcgagaaagtgaccatgacctgtagagccagcagcagcgtgtcctacatgaactggtatcagcagaagtccggcacaagccccaagcggtggatctacgatacaagcaaggtggccagcggcgtgccctacagattttctggctctggcagcggcaccagctacagcctgacaatcagcagcatggaagccgaggatgccgccacctactactgccagcagtggtccagcaatcccctgacatttggagccggcaccaagctggaactgaagggaggcggaggatctggcggatctggaagtggcggcggtggatctgcttctggctctggcgacatcaagctgcagcagtctggcgccgaacttgctagacctggcgcctctgtgaagatgagctgcaagaccagcggctacaccttcaccagatacaccatgcactgggtcaagcagaggcctggacagggactcgagtggatcggctacatcaaccccagcagaggctacaccaactacaaccagaagttcaaggacaaggccacactgaccaccgacaagagcagcagcacagcctacatgcagctgagcagcctgaccagcgaagatagcgccgtgtactactgcgcccggtactacgacgatcactacagcctggattactggggccagggcacaaccctgacagtgtcatctggaggcagctctggccaggttcagctggttcagtctggcgccgaagtgaagaaacctggcgcctctgtgaaggtgtcctgcaaggccagcggctacacctttaccagctactacatccactgggtccgacaggcccctggacaaggactggaatggatcggcagcatctaccccggcaacgtgaacaccaactacaacgagaagttcaaggaccgggccacactgaccgtggacacctctatcagcaccgcctacatggaactgagccggctgagatccgatgataccgccgtgtacttctgcaccagaagccactacggcctggactggaacttcgatgtgtggggccagggcaccaccgtgacagtttcttctggctctagcggtagtgcttcgaccaagggcccatccgtgtttcctctggctcccagcagcaagtctacaagcggaggaacagccgctctgggctgcctggtcaaggattactttcccgagcctgtgaccgtgtcctggaattctggcgctctgacaagcggcgtgcacacctttccagctgtgctgcaaagcagcggcctgtactctctgagcagcgtggtcacagtgcctagctctagcctgggcacccagacctacatctgcaatgtgaaccacaagcctagcaacaccaaggtggacaagaaggtggaacccaagagctgcgataagacccacacatgtcctccatgtcctgctccagaggctgctggtggcccttccgtgtttctgttccctccaaagcctaaggacaccctgatgatcagcaggacccctgaagtgacctgcgtggtggtggatgtgtctcacgaggacccagaagtgaagttcaattggtacgtggacggcgtggaagtgcacaacgccaagaccaagcctagagaggaacagtacaacagcacctacagagtggtgtccgtgctgaccgtgctgcaccaggattggctgaacggcaaagagtacaagtgcaaggtgtccaacaaggccctggccgctcctatcgagaaaaccatcagcaaggccaagggccagcctcgcgaacctcaagtctgtacactgcctcctagccgggacgagctgaccaagaatcaggtgtcactgagctgcgccgtgaagggcttttaccccagcgacattgccgtggaatgggagagcaatggccagccagagaacaactacaagacaacccctcctgtgctggacagcgacggctcatttttcctggtgtccaagctgacagtggacaagagcagatggcagcagggcaacgtgttcagctgcagcgtgatgcacgaggccctgcacaaccactacacccagaaaagcctgtctctgagccctggc

SEQ ID NO: 93 - DNA, 2493 bp, synthetic construct
  misc_feature 1..2493: note = Artificial Sequence
  source 1..2493: mol_type = other DNA
gacatccagctgacacagagccctgcttctctggccgtgtctctgggacagagagccaccatcagctgcaaggccagccagagcgttgactacgacggcgacagctacctgaactggtatcagcagatccccggccagcctcctaagctgctgatctacgatgccagcaacctggtgtctggcatccctcctagattttccggcagcggctctggcaccgacttcaccctgaatatccatcctgtggaaaaggtggacgccgccacctaccactgtcagcagagcacagaagatccctggacctttggcggaggcaccaagctggaaatcaagggcggatcttctggagagatcgtgctgacacagtctcccgccacactgtcactgtctccaggcgaaagagccacactgagctgtagagccagccagagcgtgtcctcttacctggcctggtatcagcagaagcctggacaggctccccggctgctgatctacgatgccagcaatagagccacaggcatccccgccagattttctggctctggcagcggcaccgatttcaccctgaccataagcagcctggaacctgaggacttcgccgtgtactactgccagcagagaagcaactggcctcctacctttggccagggcaccaaggtggaaatcaagggaggcggaggatctggcggatctggaagtggcggcggtggatctgcttctggctctggcgaagtgcagctgctggaatctggcggaggactggttcaacctggcggctctctgagactgagctgtgccgtgtccggcttcaccttcaacagcttcgccatgagctgggtccgacaggcccctggaaaaggccttgaatgggtgtccgccatctctggaagcggcggaggcacatattacgccgactctgtgaagggcagattcaccatcagccgggacaacagcaagaacaccctgtacctgcagatgaacagcctgagagccgaggataccgccgtgtacttctgcgccaaggacaagatcctttggttcggcgagcccgtgttcgactattggggacagggaaccctggtcaccgtgtctagtggaggcagctctggccaggttcagctgcagcagtctggcgccgaactcgttagacctggcagcagcgtgaagatcagctgcaaggccagcggctacgccttcagcagctactggatgaactgggtcaagcagaggcctggacagggcctcgagtggatcggacaaatttggcctggcgacggcgacaccaactacaacggcaagttcaagggcaaagccacactgaccgccgacgagtctagcagcacagcctacatgcagctgtctagcctggccagcgaagatagcgccgtgtacttctgtgccagacgggaaaccaccaccgtgggcagatattactacgccatggactactggggccagggcaccacagtgacagtctcttctgccagcggaggtagcacagtggccgctcccagcgtgttcatcttcccacctagcgacgagcagctgaagtccggcacagcctctgtcgtgtgcctgctgaacaacttctacccccgcgaggccaaagtgcagtggaaggtggacaacgccctgcagagcggcaacagccaggaaagcgtgaccgagcaggacagcaaggactccacctacagcctgagcagcaccctgacactgagcaaggccgactacgagaagcacaaggtgtacgcctgcgaagtgacccaccagggcctgtctagccccgtgaccaagagcttcaaccggggcgagtgtgataagacccacacatgtcctccatgtcctgctccagaagctgccggcggaccttccgtgtttctgttccctccaaagcctaaggacaccctgatgatcagcaggacccctgaagtgacctgcgtggtggtggatgtgtctcacgaggacccagaagtgaagttcaattggtacgtggacggcgtggaagtgcacaacgccaagaccaagcctagagaggaacagtacaacagcacctacagagtggtgtccgtgctgacagtgctgcaccaggattggctgaacggcaaagagtacaagtgcaaggtgtccaacaaggccctggctgcccctatcgagaaaaccatcagcaaggccaagggccagcctagggaaccccaggtttacacccttcctccatgccgggatgagctgaccaagaaccaggtgtccctgtggtgtctggtcaagggcttctaccccagcgacattgccgtggaatgggagagcaatggccagcctgagaacaactacaagaccacacctcctgtgctggactccgacggatcattcttcctgtacagcaagctgactgtggacaagagcagatggcagcagggcaacgtgttcagctgcagcgtgatgcacgaggccctgcacaaccactacacacagaagtccctgtctctgagccctggc

SEQ ID NO: 94 - DNA, 2142 bp, synthetic construct
  misc_feature 1..2142: note = Artificial Sequence
  source 1..2142: mol_type = other DNA
gacatcaagctgcagcagtctggcgccgaacttgctagacctggcgcctctgtgaagatgagctgcaagaccagcggctacaccttcaccagatacaccatgcactgggtcaagcagaggcctggacagggactcgagtggatcggctacatcaaccccagcagaggctacaccaactacaaccagaagttcaaggacaaggccacactgaccaccgacaagagcagcagcacagcctacatgcagctgagcagcctgaccagcgaagatagcgccgtgtactactgcgcccggtactacgacgatcactacagcctggattactggggccagggcacaaccctgacagtgtcatctggcggatcttctggacaggttcagctggttcagtctggcgccgaagtgaagaaacctggcgcctctgtgaaggtgtcctgcaaggccagcggctacacctttaccagctactacatccactgggtccgacaggcccctggacaaggactggaatggatcggcagcatctaccccggcaacgtgaacaccaactacaacgagaagttcaaggaccgggccacactgaccgtggacacctctatcagcaccgcctacatggaactgagccggctgagatccgatgataccgccgtgtacttctgcaccagaagccactacggcctggactggaacttcgatgtgtggggccagggcaccaccgtgacagtttcttctggaggcggaggatctggcggatctggaagtggcggcggtggatctgcttctggctctggcgacatccagatgacacagagccctagcagcctgtctgccagcgtgggagacagagtgaccatcacatgtcacgccagccagaacatctacgtgtggctgaactggtatcagcagaagcccggcaaggcccctaagctgctgatctacaaggccagcaatctgcacaccggcgtgcccagcagattttctggctctggcagcggcaccgacttcaccctgaccatatctagcctgcagcctgaggacttcgccacctactattgtcagcagggccagacatacccctacacctttggcggcggaacaaaggtggaaatcaagggaggcagctctggcgacatccagctgacacagagccctgccatcatgtctgctagccctggcgagaaagtgaccatgacctgtagagccagcagcagcgtgtcctacatgaactggtatcagcagaagtccggcacaagccccaagcggtggatctacgatacaagcaaggtggccagcggcgtgccctacagattttctggctctggcagcggcaccagctacagcctgacaatcagcagcatggaagccgaggatgccgccacctactactgccagcagtggtccagcaatcccctgacatttggagccggcaccaagctggaactgaaggctagtggcggctccggagataagacccacacatgtcctccatgtcctgctccagaggctgctggtggcccttccgtgtttctgttccctccaaagcctaaggacaccctgatgatcagcaggacccctgaagtgacctgcgtggtggtggatgtgtctcacgaggacccagaagtgaagttcaattggtacgtggacggcgtggaagtgcacaacgccaagaccaagcctagagaggaacagtacaacagcacctacagagtggtgtccgtgctgaccgtgctgcaccaggattggctgaacggcaaagagtacaagtgcaaggtgtccaacaaggccctggccgctcctatcgagaaaaccatcagcaaggccaagggccagcctcgcgaacctcaagtctgtacactgcctcctagccgggacgagctgaccaagaatcaggtgtcactgagctgcgccgtgaagggcttttaccccagcgacattgccgtggaatgggagagcaatggccagccagagaacaactacaagacaacccctcctgtgctggacagcgacggctcatttttcctggtgtccaagctgacagtggacaagagcagatggcagcagggcaacgtgttcagctgcagcgtgatgcacgaggccctgcacaaccactacacccagaaaagcctgtctctgagccctggc

SEQ ID NO: 95 - DNA, 2142 bp, synthetic construct
  misc_feature 1..2142: note = Artificial Sequence
  source 1..2142: mol_type = other DNA
caggttcagctggttcagtctggcgccgaagtgaagaaacctggcgcctctgtgaaggtgtcctgcaaggccagcggctacacctttaccagctactacatccactgggtccgacaggcccctggacaaggactggaatggatcggcagcatctaccccggcaacgtgaacaccaactacaacgagaagttcaaggaccgggccacactgaccgtggacacctctatcagcaccgcctacatggaactgagccggctgagatccgatgataccgccgtgtacttctgcaccagaagccactacggcctggactggaacttcgatgtgtggggccagggcaccaccgtgacagtttcttctggcggatcttctggagacatcaagctgcagcagtctggcgccgaacttgctagacctggcgcctctgtgaagatgagctgcaagaccagcggctacaccttcaccagatacaccatgcactgggtcaagcagaggcctggacagggactcgagtggatcggctacatcaaccccagcagaggctacaccaactacaaccagaagttcaaggacaaggccacactgaccaccgacaagagcagcagcacagcctacatgcagctgagcagcctgaccagcgaagatagcgccgtgtactactgcgcccggtactacgacgatcactacagcctggattactggggccagggcacaaccctgacagtgtcatctggaggcggaggatctggcggatctggaagtggcggcggtggatctgcttctggctctggcgacatccagctgacacagagccctgccatcatgtctgctagccctggcgagaaagtgaccatgacctgtagagccagcagcagcgtgtcctacatgaactggtatcagcagaagtccggcacaagccccaagcggtggatctacgatacaagcaaggtggccagcggcgtgccctacagattttctggctctggcagcggcaccagctacagcctgacaatcagcagcatggaagccgaggatgccgccacctactactgccagcagtggtccagcaatcccctgacatttggagccggcaccaagctggaactgaagggaggcagctctggcgacatccagatgacacagagccctagcagcctgtctgccagcgtgggagacagagtgaccatcacatgtcacgccagccagaacatctacgtgtggctgaactggtatcagcagaagcccggcaaggcccctaagctgctgatctacaaggccagcaatctgcacaccggcgtgcccagcagattttctggctctggcagcggcaccgacttcaccctgaccatatctagcctgcagcctgaggacttcgccacctactattgtcagcagggccagacatacccctacacctttggcggcggaacaaaggtggaaatcaaggctagtggcggctccggagataagacccacacatgtcctccatgtcctgctccagaggctgctggtggcccttccgtgtttctgttccctccaaagcctaaggacaccctgatgatcagcaggacccctgaagtgacctgcgtggtggtggatgtgtctcacgaggacccagaagtgaagttcaattggtacgtggacggcgtggaagtgcacaacgccaagaccaagcctagagaggaacagtacaacagcacctacagagtggtgtccgtgctgaccgtgctgcaccaggattggctgaacggcaaagagtacaagtgcaaggtgtccaacaaggccctggccgctcctatcgagaaaaccatcagcaaggccaagggccagcctcgcgaacctcaagtctgtacactgcctcctagccgggacgagctgaccaagaatcaggtgtcactgagctgcgccgtgaagggcttttaccccagcgacattgccgtggaatgggagagcaatggccagccagagaacaactacaagacaacccctcctgtgctggacagcgacggctcatttttcctggtgtccaagctgacagtggacaagagcagatggcagcagggcaacgtgttcagctgcagcgtgatgcacgaggccctgcacaaccactacacccagaaaagcctgtctctgagccctggc

SEQ ID NO: 96 - DNA, 2178 bp, synthetic construct
  misc_feature 1..2178: note = Artificial Sequence
  source 1..2178: mol_type = other DNA
gaagtgcagctgctggaatctggcggaggactggttcaacctggcggctctctgagactgagctgtgccgtgtccggcttcaccttcaacagcttcgccatgagctgggtccgacaggcccctggaaaaggccttgaatgggtgtccgccatctctggaagcggcggaggcacatattacgccgactctgtgaagggcagattcaccatcagccgggacaacagcaagaacaccctgtacctgcagatgaacagcctgagagccgaggataccgccgtgtacttctgcgccaaggacaagatcctttggttcggcgagcccgtgttcgactattggggacagggaaccctggtcaccgtgtctagtggcggatcttctggacaggttcagctgcagcagtctggcgccgaactcgttagacctggcagcagcgtgaagatcagctgcaaggccagcggctacgccttcagcagctactggatgaactgggtcaagcagaggcctggacagggcctcgagtggatcggacaaatttggcctggcgacggcgacaccaactacaacggcaagttcaagggcaaagccacactgaccgccgacgagtctagcagcacagcctacatgcagctgtctagcctggccagcgaagatagcgccgtgtacttctgtgccagacgggaaaccaccaccgtgggcagatattactacgccatggactactggggccagggcaccacagtgacagtctcttctggaggcggaggatctggcggatctggaagtggcggcggtggatctgcttctggctctggcgacatccagctgacacagagccctgcttctctggccgtgtctctgggacagagagccaccatcagctgcaaggccagccagagcgttgactacgacggcgacagctacctgaactggtatcagcagatccccggccagcctcctaagctgctgatctacgatgccagcaacctggtgtctggcatccctcctagattttccggcagcggctctggcaccgacttcaccctgaatatccatcctgtggaaaaggtggacgccgccacctaccactgtcagcagagcacagaagatccctggacctttggcggaggcaccaagctggaaatcaagggaggcagctctggcgagatcgtgctgacacagtctcccgccacactgtcactgtctccaggcgaaagagccacactgagctgtagagccagccagagcgtgtcctcttacctggcctggtatcagcagaagcctggacaggctccccggctgctgatctacgatgccagcaatagagccacaggcatccccgccagattttctggctctggcagcggcaccgatttcaccctgaccataagcagcctggaacctgaggacttcgccgtgtactactgccagcagagaagcaactggcctcctacctttggccagggcaccaaggtggaaatcaaggctagtggcggctccggagataagacccacacatgtcctccatgtcctgctccagaagctgccggcggaccttccgtgtttctgttccctccaaagcctaaggacaccctgatgatcagcaggacccctgaagtgacctgcgtggtggtggatgtgtctcacgaggacccagaagtgaagttcaattggtacgtggacggcgtggaagtgcacaacgccaagaccaagcctagagaggaacagtacaacagcacctacagagtggtgtccgtgctgacagtgctgcaccaggattggctgaacggcaaagagtacaagtgcaaggtgtccaacaaggccctggctgcccctatcgagaaaaccatcagcaaggccaagggccagcctagggaaccccaggtttacacccttcctccatgccgggatgagctgaccaagaaccaggtgtccctgtggtgtctggtcaagggcttctaccccagcgacattgccgtggaatgggagagcaatggccagcctgagaacaactacaagaccacacctcctgtgctggactccgacggatcattcttcctgtacagcaagctgactgtggacaagagcagatggcagcagggcaacgtgttcagctgcagcgtgatgcacgaggccctgcacaaccactacacacagaagtccctgtctctgagccctggc

SEQ ID NO: 97 - DNA, 2178 bp, synthetic construct
  misc_feature 1..2178: note = Artificial Sequence
  source 1..2178: mol_type = other DNA
caggttcagctgcagcagtctggcgccgaactcgttagacctggcagcagcgtgaagatcagctgcaaggccagcggctacgccttcagcagctactggatgaactgggtcaagcagaggcctggacagggcctcgagtggatcggacaaatttggcctggcgacggcgacaccaactacaacggcaagttcaagggcaaagccacactgaccgccgacgagtctagcagcacagcctacatgcagctgtctagcctggccagcgaagatagcgccgtgtacttctgtgccagacgggaaaccaccaccgtgggcagatattactacgccatggactactggggccagggcaccacagtgacagtctcttctggcggatcttctggagaagtgcagctgctggaatctggcggaggactggttcaacctggcggctctctgagactgagctgtgccgtgtccggcttcaccttcaacagcttcgccatgagctgggtccgacaggcccctggaaaaggccttgaatgggtgtccgccatctctggaagcggcggaggcacatattacgccgactctgtgaagggcagattcaccatcagccgggacaacagcaagaacaccctgtacctgcagatgaacagcctgagagccgaggataccgccgtgtacttctgcgccaaggacaagatcctttggttcggcgagcccgtgttcgactattggggacagggaaccctggtcaccgtgtctagtggaggcggaggatctggcggatctggaagtggcggcggtggatctgcttctggctctggcgagatcgtgctgacacagtctcccgccacactgtcactgtctccaggcgaaagagccacactgagctgtagagccagccagagcgtgtcctcttacctggcctggtatcagcagaagcctggacaggctccccggctgctgatctacgatgccagcaatagagccacaggcatccccgccagattttctggctctggcagcggcaccgatttcaccctgaccataagcagcctggaacctgaggacttcgccgtgtactactgccagcagagaagcaactggcctcctacctttggccagggcaccaaggtggaaatcaagggaggcagctctggcgacatccagctgacacagagccctgcttctctggccgtgtctctgggacagagagccaccatcagctgcaaggccagccagagcgttgactacgacggcgacagctacctgaactggtatcagcagatccccggccagcctcctaagctgctgatctacgatgccagcaacctggtgtctggcatccctcctagattttccggcagcggctctggcaccgacttcaccctgaatatccatcctgtggaaaaggtggacgccgccacctaccactgtcagcagagcacagaagatccctggacctttggcggaggcaccaagctggaaatcaaggctagtggcggctccggagataagacccacacatgtcctccatgtcctgctccagaagctgccggcggaccttccgtgtttctgttccctccaaagcctaaggacaccctgatgatcagcaggacccctgaagtgacctgcgtggtggtggatgtgtctcacgaggacccagaagtgaagttcaattggtacgtggacggcgtggaagtgcacaacgccaagaccaagcctagagaggaacagtacaacagcacctacagagtggtgtccgtgctgacagtgctgcaccaggattggctgaacggcaaagagtacaagtgcaaggtgtccaacaaggccctggctgcccctatcgagaaaaccatcagcaaggccaagggccagcctagggaaccccaggtttacacccttcctccatgccgggatgagctgaccaagaaccaggtgtccctgtggtgtctggtcaagggcttctaccccagcgacattgccgtggaatgggagagcaatggccagcctgagaacaactacaagaccacacctcctgtgctggactccgacggatcattcttcctgtacagcaagctgactgtggacaagagcagatggcagcagggcaacgtgttcagctgcagcgtgatgcacgaggccctgcacaaccactacacacagaagtccctgtctctgagccctggc

SEQ ID NO: 98 - protein, 5 aa, synthetic construct
  REGION 1..5: note = Artificial Sequence
RYTMH

SEQ ID NO: 99 - protein, 17 aa, synthetic construct
  REGION 1..17: note = Artificial Sequence
YINPSRGYTNYNQKFKD

SEQ ID NO: 100 - protein, 10 aa, synthetic construct
  REGION 1..10: note = Artificial Sequence
YYDDHYSLDY

SEQ ID NO: 101 - protein, 10 aa, synthetic construct
  REGION 1..10: note = Artificial Sequence
RASSSVSYMN

SEQ ID NO: 102 - protein, 7 aa, synthetic construct
  REGION 1..7: note = Artificial Sequence
DTSKVAS

SEQ ID NO: 103 - protein, 9 aa, synthetic construct
  REGION 1..9: note = Artificial Sequence
QQWSSNPLT

SEQ ID NO: 104 - protein, 5 aa, synthetic construct
  REGION 1..5: note = Artificial Sequence
SYWMN

SEQ ID NO: 105 - protein, 17 aa, synthetic construct
  REGION 1..17: note = Artificial Sequence
QIWPGDGDTNYNGKFKG

SEQ ID NO: 106 - protein, 15 aa, synthetic construct
  REGION 1..15: note = Artificial Sequence
RETTTVGRYYYAMDY

SEQ ID NO: 107 - protein, 15 aa, synthetic construct
  REGION 1..15: note = Artificial Sequence
KASQSVDYDGDSYLN

SEQ ID NO: 108 - protein, 7 aa, synthetic construct
  REGION 1..7: note = Artificial Sequence
DASNLVS

SEQ ID NO: 109 - protein, 9 aa, synthetic construct
  REGION 1..9: note = Artificial Sequence
QQSTEDPWT

SEQ ID NO: 110 - protein, 5 aa, synthetic construct
  REGION 1..5: note = Artificial Sequence
SFAMS

SEQ ID NO: 111 - protein, 16 aa, synthetic construct
  REGION 1..16: note = Artificial Sequence
AISGSGGGTYYADSKG

SEQ ID NO: 112 - protein, 13 aa, synthetic construct
  REGION 1..13: note = Artificial Sequence
DKILWFGEPVFDY

SEQ ID NO: 113 - protein, 11 aa, synthetic construct
  REGION 1..11: note = Artificial Sequence
RASQSVSSYLA

SEQ ID NO: 114 - protein, 7 aa, synthetic construct
  REGION 1..7: note = Artificial Sequence
DASNRAT

SEQ ID NO: 115 - protein, 9 aa, synthetic construct
  REGION 1..9: note = Artificial Sequence
QQRSNWPPT

SEQ ID NO: 116 - protein, 5 aa, synthetic construct
  REGION 1..5: note = Artificial Sequence
SYAMH

SEQ ID NO: 117 - protein, 17 aa, synthetic construct
  REGION 1..17: note = Artificial Sequence
YIYPGQGGTNYNQKFQG

SEQ ID NO: 118 - protein, 11 aa, synthetic construct
  REGION 1..11: note = Artificial Sequence
TGGLRRAYFTY

SEQ ID NO: 119 - protein, 15 aa, synthetic construct
  REGION 1..15: note = Artificial Sequence
RASQSVSSYGQGFMH

SEQ ID NO: 120 - protein, 7 aa, synthetic construct
  REGION 1..7: note = Artificial Sequence
GASSRAT

SEQ ID NO: 121 - protein, 9 aa, synthetic construct
  REGION 1..9: note = Artificial Sequence
QQNKEDPWT

SEQ ID NO: 122 - protein, 120 aa, synthetic construct [sequence omitted]

SEQ ID NO: 123 - protein, 107 aa, synthetic construct [sequence omitted]

SEQ ID NO: 124 - protein, 5 aa, synthetic construct
  REGION 1..5: note = Artificial Sequence
DTYIH

SEQ ID NO: 125 - protein, 17 aa, synthetic construct
  REGION 1..17: note = Artificial Sequence
RIYPTNGYTRYADSVKG

SEQ ID NO: 126 - protein, 11 aa, synthetic construct
  REGION 1..11: note = Artificial Sequence
WGGDGFYAMDY

SEQ ID NO: 127 - protein, 11 aa, synthetic construct
  REGION 1..11: note = Artificial Sequence
RASQDVNTAVA

SEQ ID NO: 128 - protein, 7 aa, synthetic construct
  REGION 1..7: note = Artificial Sequence
SASFLYS

SEQ ID NO: 129 - protein, 9 aa, synthetic construct
  REGION 1..9: note = Artificial Sequence
QQHYTTPPT

SEQ ID NO: 130 - protein, 940 aa, synthetic construct
  REGION 1..940: note = Artificial Sequence
DIQLTQSPAIMSASPGEKVTMTCRASSSVSYMNWYQQKSGTSPKRWIYDTSKVASGVPYRFSGSGSGTSYSLTISSMEAEDAATYYCQQWSSNPLTFGAGTKLELKGGSSGDIQMTQSPSSLSASVGDRVTITCRASQDVNTAVAWYQQKPGKAPKLLIYSASFLYSGVPSRFSGSRSGTDFTLTISSLQPEDFATYYCQQHYTTPPTFGQGTKVEIKGGGGSGGSGSGGGGSASGSGEVQLVESGGGLVQPGGSLRLSCAASGFNIKDTYIHWVRQAPGKGLEWVARIYPTNGYTRYADSVKGRFTISADTSKNTAYLQMNSLRAEDTAVYYCSRWGGDGFYAMDYWGQGTLVTVSSGGSSGDIKLQQSGAELARPGASVKMSCKTSGYTFTRYTMHWVKQRPGQGLEWIGYINPSRGYTNYNQKFKDKATLTTDKSSSTAYMQLSSLTSEDSAVYYCARYYDDHYSLDYWGQGTTLTVSSASGGSGDKTHTCPPCPAPEAAGGPSVFLFPPKPKDTLMISRTPEVTCVVVDVSHEDPEVKFNWYVDGVEVHNAKTKPREEQYNSTYRVVSVLTVLHQDWLNGKEYKCKVSNKALAAPIEKTISKAKGQPREPQVYTLPPSRDELTKNQVSLTCLVKGFYPSDIAVEWESNGQPENNYKTTPPVLDSDGSFFLYSKLTVDKSRWQQGNVFSCSVMHEALHNHYTQKSLSLSPGDKTHTCPPCPAPEAAGGPSVFLFPPKPKDTLMISRTPEVTCVVVDVSHEDPEVKFNWYVDGVEVHNAKTKPREEQYNSTYRVVSVLTVLHQDWLNGKEYKCKVSNKALAAPIEKTISKAKGQPREPQVYTLPPSRDELTKNQVSLTCLVKGFYPSDIAVEWESNGQPENNYKTTPPVLDSDGSFFLYSKLTVDKSRWQQGNVFSCSVMHEALHNHYTQKSLSLSPG

SEQ ID NO: 131 - protein, 979 aa, synthetic construct
  REGION 1..979: note = Artificial Sequence
DIQLTQSPAIMSASPGEKVTMTCRASSSVSYMNWYQQKSGTSPKRWIYDTSKVASGVPYRFSGSGSGTSYSLTISSMEAEDAATYYCQQWSSNPLTFGAGTKLELKGGSSGDIQMTQSPSSLSASVGDRVTITCRASQDVNTAVAWYQQKPGKAPKLLIYSASFLYSGVPSRFSGSRSGTDFTLTISSLQPEDFATYYCQQHYTTPPTFGQGTKVEIKGGGGSGGSGSGGGGSASGSGEVQLVESGGGLVQPGGSLRLSCAASGFNIKDTYIHWVRQAPGKGLEWVARIYPTNGYTRYADSVKGRFTISADTSKNTAYLQMNSLRAEDTAVYYCSRWGGDGFYAMDYWGQGTLVTVSSGGSSGDIKLQQSGAELARPGASVKMSCKTSGYTFTRYTMHWVKQRPGQGLEWIGYINPSRGYTNYNQKFKDKATLTTDKSSSTAYMQLSSLTSEDSAVYYCARYYDDHYSLDYWGQGTTLTVSSASGGSGDKTHTCPPCPAPEAAGGPSVFLFPPKPKDTLMISRTPEVTCVVVDVSHEDPEVKFNWYVDGVEVHNAKTKPREEQYNSTYRVVSVLTVLHQDWLNGKEYKCKVSNKALAAPIEKTISKAKGQPREPQVYTLPPSRDELTKNQVSLTCLVKGFYPSDIAVEWESNGQPENNYKTTPPVLDSDGSFFLYSKLTVDKSRWQQGNVFSCSVMHEALHNHYTQKSLSLSPGGGGGSGSGGSGGGSSGGGGSGGGGSGGGGSGGGGSGGGGSSSSTCPPCPAPEAAGGPSVFLFPPKPKDTLMISRTPEVTCVVVDVSHEDPEVKFNWYVDGVEVHNAKTKPREEQYNSTYRVVSVLTVLHQDWLNGKEYKCKVSNKALAAPIEKTISKAKGQPREPQVYTLPPSRDELTKNQVSLTCLVKGFYPSDIAVEWESNGQPENNYKTTPPVLDSDGSFFLYSKLTVDKSRWQQGNVFSCSVMHEALHNHYTQKSLSLSPG

SEQ ID NO: 132 - protein, 981 aa, synthetic construct
  REGION 1..981: note = Artificial Sequence
DIQLTQSPAIMSASPGEKVTMTCRASSSVSYMNWYQQKSGTSPKRWIYDTSKVASGVPYRFSGSGSGTSYSLTISSMEAEDAATYYCQQWSSNPLTFGAGTKLELKGGSSGDIQMTQSPSSLSASVGDRVTITCRASQDVNTAVAWYQQKPGKAPKLLIYSASFLYSGVPSRFSGSRSGTDFTLTISSLQPEDFATYYCQQHYTTPPTFGQGTKVEIKGGGGSGGSGSGGGGSASGSGEVQLVESGGGLVQPGGSLRLSCAASGFNIKDTYIHWVRQAPGKGLEWVARIYPTNGYTRYADSVKGRFTISADTSKNTAYLQMNSLRAEDTAVYYCSRWGGDGFYAMDYWGQGTLVTVSSGGSSGDIKLQQSGAELARPGASVKMSCKTSGYTFTRYTMHWVKQRPGQGLEWIGYINPSRGYTNYNQKFKDKATLTTDKSSSTAYMQLSSLTSEDSAVYYCARYYDDHYSLDYWGQGTTLTVSSASGGSGDKTHTCPPCPAPEAAGGPSVFLFPPKPKDTLMISRTPEVTCVVVDVSHEDPEVKFNWYVDGVEVHNAKTKPREEQYNSTYRVVSVLTVLHQDWLNGKEYKCKVSNKALAAPIEKTISKAKGQPREPQVYTLPPSRDELTKNQVSLTCLVKGFYPSDIAVEWESNGQPENNYKTTPPVLDSDGSFFLYSKLTVDKSRWQQGNVFSCSVMHEALHNHYTQKSLSLSPGGGGGSGSGGSGGGSSGGGGSGGGGSGGGGSGGGGSGGGGSSSSGSTCPPCPAPEAAGGPSVFLFPPKPKDTLMISRTPEVTCVVVDVSHEDPEVKFNWYVDGVEVHNAKTKPREEQYNSTYRVVSVLTVLHQDWLNGKEYKCKVSNKALAAPIEKTISKAKGQPREPQVYTLPPSRDELTKNQVSLTCLVKGFYPSDIAVEWESNGQPENNYKTTPPVLDSDGSFFLYSKLTVDKSRWQQGNVFSCSVMHEALHNHYTQKSLSLSPG

SEQ ID NO: 133 - protein, 720 aa, synthetic construct
  REGION 1..720: note = Artificial Sequence
DIQLTQSPAIMSASPGEKVTMTCRASSSVSYMNWYQQKSGTSPKRWIYDTSKVASGVPYRFSGSGSGTSYSLTISSMEAEDAATYYCQQWSSNPLTFGAGTKLELKGGSSGDIQMTQSPSSLSASVGDRVTITCRASQDVNTAVAWYQQKPGKAPKLLIYSASFLYSGVPSRFSGSRSGTDFTLTISSLQPEDFATYYCQQHYTTPPTFGQGTKVEIKGGGGSGGSGSGGGGSASGSGEVQLVESGGGLVQPGGSLRLSCAASGFNIKDTYIHWVRQAPGKGLEWVARIYPTNGYTRYADSVKGRFTISADTSKNTAYLQMNSLRAEDTAVYYCSRWGGDGFYAMDYWGQGTLVTVSSGGSSGDIKLQQSGAELARPGASVKMSCKTSGYTFTRYTMHWVKQRPGQGLEWIGYINPSRGYTNYNQKFKDKATLTTDKSSSTAYMQLSSLTSEDSAVYYCARYYDDHYSLDYWGQGTTLTVSSASGGSGGQPREPQVYTLPPSRDELTKNQVSLTCLVKGFYPSDIAVEWESNGQPENNYKTTPPVLDSDGSFFLYSKLTVDKSRWQQGNVFSCSVMHEALHNHYTQKSLSLSPGGGGSSGGGGSGGSGSGGSGSGQPREPQVYTLPPSRDELTKNQVSLTCLVKGFYPSDIAVEWESNGQPENNYKTTPPVLDSDGSFFLYSKLTVDKSRWQQGNVFSCSVMHEALHNHYTQKSLSLSPG

SEQ ID NO: 134 - protein, 722 aa, synthetic construct
  REGION 1..722: note = Artificial Sequence
DIQLTQSPAIMSASPGEKVTMTCRASSSVSYMNWYQQKSGTSPKRWIYDTSKVASGVPYRFSGSGSGTSYSLTISSMEAEDAATYYCQQWSSNPLTFGAGTKLELKGGSSGDIQMTQSPSSLSASVGDRVTITCRASQDVNTAVAWYQQKPGKAPKLLIYSASFLYSGVPSRFSGSRSGTDFTLTISSLQPEDFATYYCQQHYTTPPTFGQGTKVEIKGGGGSGGSGSGGGGSASGSGEVQLVESGGGLVQPGGSLRLSCAASGFNIKDTYIHWVRQAPGKGLEWVARIYPTNGYTRYADSVKGRFTISADTSKNTAYLQMNSLRAEDTAVYYCSRWGGDGFYAMDYWGQGTLVTVSSGGSSGDIKLQQSGAELARPGASVKMSCKTSGYTFTRYTMHWVKQRPGQGLEWIGYINPSRGYTNYNQKFKDKATLTTDKSSSTAYMQLSSLTSEDSAVYYCARYYDDHYSLDYWGQGTTLTVSSASGGSGGQPREPQVYTLPPSRDELTKNQVSLTCLVKGFYPSDIAVEWESNGQPENNYKTTPPVLDSDGSFFLYSKLTVDKSRWQQGNVFSCSVMHEALHNHYTQKSLSLSPGGSGSSGGGGSGGSGSGGSGSSGGQPREPQVYTLPPSRDELTKNQVSLTCLVKGFYPSDIAVEWESNGQPENNYKTTPPVLDSDGSFFLYSKLTVDKSRWQQGNVFSCSVMHEALHNHYTQKSLSLSPG

SEQ ID NO: 135 - protein, 756 aa, synthetic construct
  REGION 1..756: note = Artificial Sequence
DIQLTQSPAIMSASPGEKVTMTCRASSSVSYMNWYQQKSGTSPKRWIYDTSKVASGVPYRFSGSGSGTSYSLTISSMEAEDAATYYCQQWSSNPLTFGAGTKLELKGGSSGDIQMTQSPSSLSASVGDRVTITCRASQDVNTAVAWYQQKPGKAPKLLIYSASFLYSGVPSRFSGSRSGTDFTLTISSLQPEDFATYYCQQHYTTPPTFGQGTKVEIKGGGGSGGSGSGGGGSASGSGEVQLVESGGGLVQPGGSLRLSCAASGFNIKDTYIHWVRQAPGKGLEWVARIYPTNGYTRYADSVKGRFTISADTSKNTAYLQMNSLRAEDTAVYYCSRWGGDGFYAMDYWGQGTLVTVSSGGSSGDIKLQQSGAELARPGASVKMSCKTSGYTFTRYTMHWVKQRPGQGLEWIGYINPSRGYTNYNQKFKDKATLTTDKSSSTAYMQLSSLTSEDSAVYYCARYYDDHYSLDYWGQGTTLTVSSASGGSGSSGCPPCPAPEAAGGPSGQPREPQVYTLPPSRDELTKNQVSLTCLVKGFYPSDIAVEWESNGQPENNYKTTPPVLDSDGSFFLYSKLTVDKSRWQQGNVFSCSVMHEALHNHYTQKSLSLSPGGSGSSGGGGSGGSGSGGSGSSGSSGCPPCPAPEAAGGPSGQPREPQVYTLPPSRDELTKNQVSLTCLVKGFYPSDIAVEWESNGQPENNYKTTPPVLDSDGSFFLYSKLTVDKSRWQQGNVFSCSVMHEALHNHYTQKSLSLSPG

SEQ ID NO: 136 - protein, 752 aa, synthetic construct
  REGION 1..752: note = Artificial Sequence
DIQLTQSPAIMSASPGEKVTMTCRASSSVSYMNWYQQKSGTSPKRWIYDTSKVASGVPYRFSGSGSGTSYSLTISSMEAEDAATYYCQQWSSNPLTFGAGTKLELKGGSSGDIQMTQSPSSLSASVGDRVTITCRASQDVNTAVAWYQQKPGKAPKLLIYSASFLYSGVPSRFSGSRSGTDFTLTISSLQPEDFATYYCQQHYTTPPTFGQGTKVEIKGGGGSGGSGSGGGGSASGSGEVQLVESGGGLVQPGGSLRLSCAASGFNIKDTYIHWVRQAPGKGLEWVARIYPTNGYTRYADSVKGRFTISADTSKNTAYLQMNSLRAEDTAVYYCSRWGGDGFYAMDYWGQGTLVTVSSGGSSGDIKLQQSGAELARPGASVKMSCKTSGYTFTRYTMHWVKQRPGQGLEWIGYINPSRGYTNYNQKFKDKATLTTDKSSSTAYMQLSSLTSEDSAVYYCARYYDDHYSLDYWGQGTTLTVSSASGGSGSCPPCPAPEAAGGSSGQPREPQVYTLPPSRDELTKNQVSLTCLVKGFYPSDIAVEWESNGQPENNYKTTPPVLDSDGSFFLYSKLTVDKSRWQQGNVFSCSVMHEALHNHYTQKSLSLSPGGSGSSGGGGSGGSGSGGSGSSGSCPPCPAPEAAGGSSGQPREPQVYTLPPSRDELTKNQVSLTCLVKGFYPSDIAVEWESNGQPENNYKTTPPVLDSDGSFFLYSKLTVDKSRWQQGNVFSCSVMHEALHNHYTQKSLSLSPG

SEQ ID NO: 137 - protein, 1204 aa, synthetic construct
  REGION 1..1204: note = Artificial Sequence
DIQLTQSPAIMSASPGEKVTMTCRASSSVSYMNWYQQKSGTSPKRWIYDTSKVASGVPYRFSGSGSGTSYSLTISSMEAEDAATYYCQQWSSNPLTFGAGTKLELKGGSSGDIQMTQSPSSLSASVGDRVTITCRASQDVNTAVAWYQQKPGKAPKLLIYSASFLYSGVPSRFSGSRSGTDFTLTISSLQPEDFATYYCQQHYTTPPTFGQGTKVEIKGGGGSGGSGSGGGGSASGSGEVQLVESGGGLVQPGGSLRLSCAASGFNIKDTYIHWVRQAPGKGLEWVARIYPTNGYTRYADSVKGRFTISADTSKNTAYLQMNSLRAEDTAVYYCSRWGGDGFYAMDYWGQGTLVTVSSGGSSGDIKLQQSGAELARPGASVKMSCKTSGYTFTRYTMHWVKQRPGQGLEWIGYINPSRGYTNYNQKFKDKATLTTDKSSSTAYMQLSSLTSEDSAVYYCARYYDDHYSLDYWGQGTTLTVSSRTVAAPSVFIFPPSDEQLKSGTASVVCLLNNFYPREAKVQWKVDNALQSGNSQESVTEQDSKDSTYSLSSTLTLSKADYEKHKVYACEVTHQGLSSPVTKSFNRGECGGGGSGGSGSGGGGSASGSGASTKGPSVFPLAPSSKSTSGGTAALGCLVKDYFPEPVTVSWNSGALTSGVHTFPAVLQSSGLYSLSSVVTVPSSSLGTQTYICNVNHKPSNTKVDKKVEPKSCDKTHTCPPCPAPEAAGGPSVFLFPPKPKDTLMISRTPEVTCVVVDVSHEDPEVKFNWYVDGVEVHNAKTKPREEQYNSTYRVVSVLTVLHQDWLNGKEYKCKVSNKALAAPIEKTISKAKGQPREPQVYTLPPSRDELTKNQVSLTCLVKGFYPSDIAVEWESNGQPENNYKTTPPVLDSDGSFFLYSKLTVDKSRWQQGNVFSCSVMHEALHNHYTQKSLSLSPGGGGGSGSGGSGGGSSGGGGSGGGGSGGGGSGGGGSGGGGSDKTHTCPPCPAPEAAGGPSVFLFPPKPKDTLMISRTPEVTCVVVDVSHEDPEVKFNWYVDGVEVHNAKTKPREEQYNSTYRVVSVLTVLHQDWLNGKEYKCKVSNKALAAPIEKTISKAKGQPREPQVYTLPPSRDELTKNQVSLTCLVKGFYPSDIAVEWESNGQPENNYKTTPPVLDSDGSFFLYSKLTVDKSRWQQGNVFSCSVMHEALHNHYTQKSLSLSPG

SEQ ID NO: 138 - protein, 982 aa, synthetic construct
  REGION 1..982: note = Artificial Sequence
DIQLTQSPAIMSASPGEKVTMTCRASSSVSYMNWYQQKSGTSPKRWIYDTSKVASGVPYRFSGSGSGTSYSLTISSMEAEDAATYYCQQWSSNPLTFGAGTKLELKGGSSGDIQMTQSPSSLSASVGDRVTITCRASQDVNTAVAWYQQKPGKAPKLLIYSASFLYSGVPSRFSGSRSGTDFTLTISSLQPEDFATYYCQQHYTTPPTFGQGTKVEIKGGGGSGGSGSGGGGSASGSGEVQLVESGGGLVQPGGSLRLSCAASGFNIKDTYIHWVRQAPGKGLEWVARIYPTNGYTRYADSVKGRFTISADTSKNTAYLQMNSLRAEDTAVYYCSRWGGDGFYAMDYWGQGTLVTVSSGGSSGDIKLQQSGAELARPGASVKMSCKTSGYTFTRYTMHWVKQRPGQGLEWIGYINPSRGYTNYNQKFKDKATLTTDKSSSTAYMQLSSLTSEDSAVYYCARYYDDHYSLDYWGQGTTLTVSSRTVAAPSVFIFPPSDEQLKSGTASVVCLLNNFYPREAKVQWKVDNALQSGNSQESVTEQDSKDSTYSLSSTLTLSKADYEKHKVYACEVTHQGLSSPVTKSFNRGECGGGGSGGSGSGGGGSASGSGASTKGPSVFPLAPSSKSTSGGTAALGCLVKDYFPEPVTVSWNSGALTSGVHTFPAVLQSSGLYSLSSVVTVPSSSLGTQTYICNVNHKPSNTKVDKKVEPKSCDKTHTCPPCPAPEAAGGPSGQPREPQVYTLPPSRDELTKNQVSLTCLVKGFYPSDIAVEWESNGQPENNYKTTPPVLDSDGSFFLYSKLTVDKSRWQQGNVFSCSVMHEALHNHYTQKSLSLSPGGSGSSGGGGSGGSGSGGSGSSGSSGCPPCPAPEAAGGPSGQPREPQVYTLPPSRDELTKNQVSLTCLVKGFYPSDIAVEWESNGQPENNYKTTPPVLDSDGSFFLYSKLTVDKSRWQQGNVFSCSVMHEALHNHYTQKSLSLSPG

SEQ ID NO: 139 - DNA, 2940 bp, synthetic construct
  misc_feature 1..2940: note = Artificial Sequence
  source 1..2940: mol_type = other DNA
gacatccagctgacacagagccctgccatcatgtctgctagccctggcgagaaagtgaccatgacctgtagagccagcagcagcgtgtcctacatgaactggtatcagcagaagtccggcacaagccccaagcggtggatctacgatacaagcaaggtggccagcggcgtgccctacagattttctggctctggcagcggcaccagctacagcctgacaatcagcagcatggaagccgaggatgccgccacctactactgccagcagtggtccagcaatcccctgacatttggagccggcaccaagctggaactgaagggcggatcttctggagacatccagatgacacagagccctagcagcctgtctgccagcgtgggagacagagtgaccatcacctgtagagccagccaggacgtgaacacagccgtggcttggtatcagcagaagcctggcaaggcccctaagctgctgatctacagcgccagctttctgtacagcggcgtgcccagcagattcagcggaagcagaagcggcaccgacttcaccctgaccataagcagtctgcagcccgaggacttcgccacctactactgtcagcagcactacaccacacctccaacctttggccagggcaccaaggtggaaatcaagggaggcggaggatctggcggatctggaagtggcggcggtggatctgcttctggctctggcgaggtgcagctggttgaatctggcggaggactggttcagcctggcggatctctgagactgtcttgtgccgccagcggcttcaacatcaaggacacctacatccactgggtccgacaggcccctggcaaaggacttgaatgggtcgccagaatctaccccaccaacggctacaccagatacgccgactctgtgaagggcagattcaccatcagcgccgacaccagcaagaacaccgcctacctgcagatgaacagcctgagagccgaggacaccgccgtgtactactgtagtagatggggaggcgacggcttctacgccatggattattggggccagggcaccctggtcaccgtttcttctggaggcagctctggcgacatcaagctgcagcagtctggcgccgaacttgctagacctggcgcctctgtgaagatgagctgcaagaccagcggctacaccttcaccagatacaccatgcactgggtcaagcagaggcctggacagggactcgagtggatcggctacatcaaccccagcagaggctacaccaactacaaccagaagttcaaggacaaggccacactgaccaccgacaagagcagcagcacagcctacatgcagctgagcagcctgaccagcgaagatagcgccgtgtactactgcgcccggtactacgacgatcactacagcctggattactggggccagggcacaaccctgacagtgtcatctgctagtggcggctccggagacaagacccacacctgtcctccatgtcctgctccagaagctgctggcggcccttctgtgttcctgtttcctccaaagcctaaggacaccctgatgatcagcagaacccctgaagtgacctgcgtggtggtggatgtgtctcacgaggaccccgaagtgaagttcaattggtacgtggacggcgtggaagtgcacaacgccaagaccaagcctagagaggaacagtacaacagcacctacagagtggtgtccgtgctgaccgtgctgcaccaggattggctgaacggcaaagagtacaagtgcaaggtgtccaacaaggccctggccgctcctatcgagaaaaccatcagcaaggccaagggccagcctagggagcctcaggtgtacacactgcctccaagcagagatgagctgaccaagaaccaggtgtccctgacctgtctggtcaagggcttctacccctccgatatcgccgtggaatgggagagcaatggccagcctgagaacaactacaagaccacacctcctgtgctggacagcgacggctcattcttcctgtacagcaagctgaccgtggacaagagcagatggcagcagggcaacgtgttcagctgcagcgtgatgcacgaggccctgcacaaccactacacccagaagtccctgtctctgtctcctggcggaggcggaggatctggtagcggtggatctggcggcggatcttcaggtggcggaggaagtggcggcggaggtagcggaggtggtggaagcggaggtggcggatcaggcggcggaggctctgataagacacacacctgtcctccatgtcctgctccagaagctgctggcggcccttccgtgtttctgttccctccaaagcctaaggacaccctgatgatcagccgtacgcctgaagtgacctgcgtggtggtggatgtgtctcacgaagatcccgaagtgaagtttaattggtacgtggacggcgtggaagtgcacaacgccaagaccaagcctagagaggaacagtacaacagcacctacagagtggtgtccgtgctgacagtgctgcaccaggattggctgaacggcaaagagtacaagtgcaaggtgtccaacaaggccctggccgctcctatcgagaaaaccatcagcaaggccaagggccagccaagagaaccccaggtttacaccctgccaccttctagggacgaactcaccaagaatcaagtgtctctcacatgcctcgtgaaggggttttaccccagcgacattgccgtcgagtgggagtccaatggacaacccgagaacaattataagacgaccccaccagtcctggactccgacggctcattctttctctactctaaactcaccgtggataagtcccggtggcagcaagggaatgtgttttcctgctccgtgatgcatgaagctctccacaatcattacacccaaaagagtctgtctctgagccccggc

SEQ ID NO: 140 - DNA, 2937 bp, synthetic construct
  misc_feature 1..2937: note = Artificial Sequence
  source 1..2937: mol_type = other DNA
gacatccagctgacacagagccctgccatcatgtctgctagccctggcgagaaagtgaccatgacctgtagagccagcagcagcgtgtcctacatgaactggtatcagcagaagtccggcacaagccccaagcggtggatctacgatacaagcaaggtggccagcggcgtgccctacagattttctggctctggcagcggcaccagctacagcctgacaatcagcagcatggaagccgaggatgccgccacctactactgccagcagtggtccagcaatcccctgacatttggagccggcaccaagctggaactgaagggcggatcttctggagacatccagatgacacagagccctagcagcctgtctgccagcgtgggagacagagtgaccatcacctgtagagccagccaggacgtgaacacagccgtggcttggtatcagcagaagcctggcaaggcccctaagctgctgatctacagcgccagctttctgtacagcggcgtgcccagcagattcagcggaagcagaagcggcaccgacttcaccctgaccataagcagtctgcagcccgaggacttcgccacctactactgtcagcagcactacaccacacctccaacctttggccagggcaccaaggtggaaatcaagggaggcggaggatctggcggatctggaagtggcggcggtggatctgcttctggctctggcgaggtgcagctggttgaatctggcggaggactggttcagcctggcggatctctgagactgtcttgtgccgccagcggcttcaacatcaaggacacctacatccactgggtccgacaggcccctggcaaaggacttgaatgggtcgccagaatctaccccaccaacggctacaccagatacgccgactctgtgaagggcagattcaccatcagcgccgacaccagcaagaacaccgcctacctgcagatgaacagcctgagagccgaggacaccgccgtgtactactgtagtagatggggaggcgacggcttctacgccatggattattggggccagggcaccctggtcaccgtttcttctggaggcagctctggcgacatcaagctgcagcagtctggcgccgaacttgctagacctggcgcctctgtgaagatgagctgcaagaccagcggctacaccttcaccagatacaccatgcactgggtcaagcagaggcctggacagggactcgagtggatcggctacatcaaccccagcagaggctacaccaactacaaccagaagttcaaggacaaggccacactgaccaccgacaagagcagcagcacagcctacatgcagctgagcagcctgaccagcgaagatagcgccgtgtactactgcgcccggtactacgacgatcactacagcctggattactggggccagggcacaaccctgacagtgtcatctgctagtggcggctccggagacaagacccacacctgtcctccatgtcctgctccagaagctgctggcggcccttctgtgttcctgtttcctccaaagcctaaggacaccctgatgatcagcagaacccctgaagtgacctgcgtggtggtggatgtgtctcacgaggaccccgaagtgaagttcaattggtacgtggacggcgtggaagtgcacaacgccaagaccaagcctagagaggaacagtacaacagcacctacagagtggtgtccgtgctgaccgtgctgcaccaggattggctgaacggcaaagagtacaagtgcaaggtgtccaacaaggccctggccgctcctatcgagaaaaccatcagcaaggccaagggccagcctagggagcctcaggtgtacacactgcctccaagcagagatgagctgaccaagaaccaggtgtccctgacctgtctggtcaagggcttctacccctccgatatcgccgtggaatgggagagcaatggccagcctgagaacaactacaagaccacacctcctgtgctggacagcgacggctcattcttcctgtacagcaagctgaccgtggacaagagcagatggcagcagggcaacgtgttcagctgcagcgtgatgcacgaggccctgcacaaccactacacccagaagtccctgtctctgtctcctggcggaggcggaggatctggtagcggtggatctggcggcggatcttcaggtggcggaggaagtggcggcggaggtagcggaggtggtggaagcggaggtggcggatcaggcggcggaggctctagctctagtacctgtcctccatgtcctgctccagaagctgctggcggcccttccgtgtttctgttccctccaaagcctaaggacaccctgatgatcagccgtacgcctgaagtgacctgcgtggtggtggatgtgtctcacgaagatcccgaagtgaagtttaattggtacgtggacggcgtggaagtgcacaacgccaagaccaagcctagagaggaacagtacaacagcacctacagagtggtgtccgtgctgacagtgctgcaccaggattggctgaacggcaaagagtacaagtgcaaggtgtccaacaaggccctggccgctcctatcgagaaaaccatcagcaaggccaagggccagccaagagaaccccaggtttacaccctgccaccttctagggacgaactcaccaagaatcaagtgtctctcacatgcctcgtgaaggggttttaccccagcgacattgccgtcgagtgggagtccaatggacaacccgagaacaattataagacgaccccaccagtcctggactccgacggctcattctttctctactctaaactcaccgtggataagtcccggtggcagcaagggaatgtgttttcctgctccgtgatgcatgaagctctccacaatcattacacccaaaagagtctgtctctgagccccggc

SEQ ID NO: 141 - DNA, 2943 bp, synthetic construct
  misc_feature 1..2943: note = Artificial Sequence
  source 1..2943: mol_type = other DNA
gacatccagctgacacagagccctgccatcatgtctgctagccctggcgagaaagtgaccatgacctgtagagccagcagcagcgtgtcctacatgaactggtatcagcagaagtccggcacaagccccaagcggtggatctacgatacaagcaaggtggccagcggcgtgccctacagattttctggctctggcagcggcaccagctacagcctgacaatcagcagcatggaagccgaggatgccgccacctactactgccagcagtggtccagcaatcccctgacatttggagccggcaccaagctggaactgaagggcggatcttctggagacatccagatgacacagagccctagcagcctgtctgccagcgtgggagacagagtgaccatcacctgtagagccagccaggacgtgaacacagccgtggcttggtatcagcagaagcctggcaaggcccctaagctgctgatctacagcgccagctttctgtacagcggcgtgcccagcagattcagcggaagcagaagcggcaccgacttcaccctgaccataagcagtctgcagcccgaggacttcgccacctactactgtcagcagcactacaccacacctccaacctttggccagggcaccaaggtggaaatcaagggaggcggaggatctggcggatctggaagtggcggcggtggatctgcttctggctctggcgaggtgcagctggttgaatctggcggaggactggttcagcctggcggatctctgagactgtcttgtgccgccagcggcttcaacatcaaggacacctacatccactgggtccgacaggcccctggcaaaggacttgaatgggtcgccagaatctaccccaccaacggctacaccagatacgccgactctgtgaagggcagattcaccatcagcgccgacaccagcaagaacaccgcctacctgcagatgaacagcctgagagccgaggacaccgccgtgtactactgtagtagatggggaggcgacggcttctacgccatggattattggggccagggcaccctggtcaccgtttcttctggaggcagctctggcgacatcaagctgcagcagtctggcgccgaacttgctagacctggcgcctctgtgaagatgagctgcaagaccagcggctacaccttcaccagatacaccatgcactgggtcaagcagaggcctggacagggactcgagtggatcggctacatcaaccccagcagaggctacaccaactacaaccagaagttcaaggacaaggccacactgaccaccgacaagagcagcagcacagcctacatgcagctgagcagcctgaccagcgaagatagcgccgtgtactactgcgcccggtactacgacgatcactacagcctggattactggggccagggcacaaccctgacagtgtcatctgctagtggcggctccggagacaagacccacacctgtcctccatgtcctgctccagaagctgctggcggcccttctgtgttcctgtttcctccaaagcctaaggacaccctgatgatcagcagaacccctgaagtgacctgcgtggtggtggatgtgtctcacgaggaccccgaagtgaagttcaattggtacgtggacggcgtggaagtgcacaacgccaagaccaagcctagagaggaacagtacaacagcacctacagagtggtgtccgtgctgaccgtgctgcaccaggattggctgaacggcaaagagtacaagtgcaaggtgtccaacaaggccctggccgctcctatcgagaaaaccatcagcaaggccaagggccagcctagggagcctcaggtgtacacactgcctccaagcagagatgagctgaccaagaaccaggtgtccctgacctgtctggtcaagggcttctacccctccgatatcgccgtggaatgggagagcaatggccagcctgagaacaactacaagaccacacctcctgtgctggacagcgacggctcattcttcctgtacagcaagctgaccgtggacaagagcagatggcagcagggcaacgtgttcagctgcagcgtgatgcacgaggccctgcacaaccactacacccagaagtccctgtctctgtctcctggcggaggcggaggatctggtagcggtggatctggcggcggatcttcaggtggcggaggaagtggcggcggaggtagcggaggtggtggaagcggaggtggcggatcaggcggcggaggctctagctctagtggctctacctgtcctccatgtcctgctccagaagctgctggcggcccttccgtgtttctgttccctccaaagcctaaggacaccctgatgatcagccgtacgcctgaagtgacctgcgtggtggtggatgtgtctcacgaagatcccgaagtgaagtttaattggtacgtggacggcgtggaagtgcacaacgccaagaccaagcctagagaggaacagtacaacagcacctacagagtggtgtccgtgctgacagtgctgcaccaggattggctgaacggcaaagagtacaagtgcaaggtgtccaacaaggccctggccgctcctatcgagaaaaccatcagcaaggccaagggccagccaagagaaccccaggtttacaccctgccaccttctagggacgaactcaccaagaatcaagtgtctctcacatgcctcgtgaaggggttttaccccagcgacattgccgtcgagtgggagtccaatggacaacccgagaacaattataagacgaccccaccagtcctggactccgacggctcattctttctctactctaaactcaccgtggataagtcccggtggcagcaagggaatgtgttttcctgctccgtgatgcatgaagctctccacaatcattacacccaaaagagtctgtctctgagccccggc

SEQ ID NO: 142 - DNA, 2160 bp, synthetic construct
  misc_feature 1..2160: note = Artificial Sequence
  source 1..2160: mol_type = other DNA
gacatccagctgacacagagccctgccatcatgtctgctagccctggcgagaaagtgaccatgacctgtagagccagcagcagcgtgtcctacatgaactggtatcagcagaagtccggcacaagccccaagcggtggatctacgatacaagcaaggtggccagcggcgtgccctacagattttctggctctggcagcggcaccagctacagcctgacaatcagcagcatggaagccgaggatgccgccacctactactgccagcagtggtccagcaatcccctgacatttggagccggcaccaagctggaactgaagggcggatcttctggagacatccagatgacacagagccctagcagcctgtctgccagcgtgggagacagagtgaccatcacctgtagagccagccaggacgtgaacacagccgtggcttggtatcagcagaagcctggcaaggcccctaagctgctgatctacagcgccagctttctgtacagcggcgtgcccagcagattcagcggaagcagaagcggcaccgacttcaccctgaccataagcagtctgcagcccgaggacttcgccacctactactgtcagcagcactacaccacacctccaacctttggccagggcaccaaggtggaaatcaagggaggcggaggatctggcggatctggaagtggcggcggtggatctgcttctggctctggcgaggtgcagctggttgaatctggcggaggactggttcagcctggcggatctctgagactgtcttgtgccgccagcggcttcaacatcaaggacacctacatccactgggtccgacaggcccctggcaaaggacttgaatgggtcgccagaatctaccccaccaacggctacaccagatacgccgactctgtgaagggcagattcaccatcagcgccgacaccagcaagaacaccgcctacctgcagatgaacagcctgagagccgaggacaccgccgtgtactactgtagtagatggggaggcgacggcttctacgccatggattattggggccagggcaccctggtcaccgtttcttctggaggcagctctggcgacatcaagctgcagcagtctggcgccgaacttgctagacctggcgcctctgtgaagatgagctgcaagaccagcggctacaccttcaccagatacaccatgcactgggtcaagcagaggcctggacagggactcgagtggatcggctacatcaaccccagcagaggctacaccaactacaaccagaagttcaaggacaaggccacactgaccaccgacaagagcagcagcacagcctacatgcagctgagcagcctgaccagcgaagatagcgccgtgtactactgcgcccggtactacgacgatcactacagcctggattactggggccagggcacaaccctgacagtgtcatctgctagtggcggctccggaggccagcctagggaaccccaggtttacacactgcctccaagcagggacgagctgaccaagaatcaggtgtccctgacctgcctcgtgaagggcttttaccccagcgacattgccgtggaatgggagagcaatggccagcctgagaacaactacaagacaacccctcctgtgctggacagcgacggctcattcttcctgtacagcaagctgacagtggacaagtccagatggcagcagggcaacgtgttcagctgcagcgtgatgcacgaggccctgcacaaccactacacccagaagtccctgagcctgtctcctggaggcggaggatcttctggcggaggtggaagtggtggatctggctctggcggttctggatctggacagccgcgggaaccccaggtctacaccttgccaccatccagggacgaactgacaaagaatcaagtctctctgacctgcctcgtgaaggggttttaccctagcgacattgccgtcgagtgggagtctaacgggcagcccgaaaacaattataagacaaccccaccagtgctggactccgatggctcattctttctctactctaaactcaccgtggataagtcccggtggcagcaagggaatgtgttttcctgctccgtgatgcatgaagctctccacaatcattacacccaaaagagtctgtctctgagccccggc

SEQ ID NO: 143 - DNA, 2166 bp, synthetic construct
  misc_feature 1..2166: note = Artificial Sequence
  source 1..2166: mol_type = other DNA
gacatccagctgacacagagccctgccatcatgtctgctagccctggcgagaaagtgaccatgacctgtagagccagcagcagcgtgtcctacatgaactggtatcagcagaagtccggcacaagccccaagcggtggatctacgatacaagcaaggtggccagcggcgtgccctacagattttctggctctggcagcggcaccagctacagcctgacaatcagcagcatggaagccgaggatgccgccacctactactgccagcagtggtccagcaatcccctgacatttggagccggcaccaagctggaactgaagggcggatcttctggagacatccagatgacacagagccctagcagcctgtctgccagcgtgggagacagagtgaccatcacctgtagagccagccaggacgtgaacacagccgtggcttggtatcagcagaagcctggcaaggcccctaagctgctgatctacagcgccagctttctgtacagcggcgtgcccagcagattcagcggaagcagaagcggcaccgacttcaccctgaccataagcagtctgcagcccgaggacttcgccacctactactgtcagcagcactacaccacacctccaacctttggccagggcaccaaggtggaaatcaagggaggcggaggatctggcggatctggaagtggcggcggtggatctgcttctggctctggcgaggtgcagctggttgaatctggcggaggactggttcagcctggcggatctctgagactgtcttgtgccgccagcggcttcaacatcaaggacacctacatccactgggtccgacaggcccctggcaaaggacttgaatgggtcgccagaatctaccccaccaacggctacaccagatacgccgactctgtgaagggcagattcaccatcagcgccgacaccagcaagaacaccgcctacctgcagatgaacagcctgagagccgaggacaccgccgtgtactactgtagtagatggggaggcgacggcttctacgccatggattattggggccagggcaccctggtcaccgtttcttctggaggcagctctggcgacatcaagctgcagcagtctggcgccgaacttgctagacctggcgcctctgtgaagatgagctgcaagaccagcggctacaccttcaccagatacaccatgcactgggtcaagcagaggcctggacagggactcgagtggatcggctacatcaaccccagcagaggctacaccaactacaaccagaagttcaaggacaaggccacactgaccaccgacaagagcagcagcacagcctacatgcagctgagcagcctgaccagcgaagatagcgccgtgtactactgcgcccggtactacgacgatcactacagcctggattactggggccagggcacaaccctgacagtgtcatctgctagtggcggctccggaggccagcctagggaaccccaggtttacacactgcctccaagcagggacgagctgaccaagaatcaggtgtccctgacctgcctcgtgaagggcttttaccccagcgacattgccgtggaatgggagagcaatggccagcctgagaacaactacaagacaacccctcctgtgctggacagcgacggctcattcttcctgtacagcaagctgacagtggacaagtccagatggcagcagggcaacgtgttcagctgcagcgtgatgcacgaggccctgcacaaccactacacccagaagtccctgagcctgtctcctggaggcagcggatcttctggcggaggtggaagtggtggatctggctctggcggttctggatctagcggtggacagccgcgggaaccccaggtctacaccttgccaccatccagggacgaactgacaaagaatcaagtctctctgacctgcctcgtgaaggggttttaccctagcgacattgccgtcgagtgggagtctaacgggcagcccgaaaacaattataagacaaccccaccagtgctggactccgatggctcattctttctctactctaaactcaccgtggataagtcccggtggcagcaagggaatgtgttttcctgctccgtgatgcatgaagctctccacaatcattacacccaaaagagtctgtctctgagccccggc

SEQ ID NO: 144 - DNA, 2268 bp, synthetic construct
  misc_feature 1..2268: note = Artificial Sequence
  source 1..2268: mol_type = other DNA
gacatccagctgacacagagccctgccatcatgtctgctagccctggcgagaaagtgaccatgacctgtagagccagcagcagcgtgtcctacatgaactggtatcagcagaagtccggcacaagccccaagcggtggatctacgatacaagcaaggtggccagcggcgtgccctacagattttctggctctggcagcggcaccagctacagcctgacaatcagcagcatggaagccgaggatgccgccacctactactgccagcagtggtccagcaatcccctgacatttggagccggcaccaagctggaactgaagggcggatcttctggagacatccagatgacacagagccctagcagcctgtctgccagcgtgggagacagagtgaccatcacctgtagagccagccaggacgtgaacacagccgtggcttggtatcagcagaagcctggcaaggcccctaagctgctgatctacagcgccagctttctgtacagcggcgtgcccagcagattcagcggaagcagaagcggcaccgacttcaccctgaccataagcagtctgcagcccgaggacttcgccacctactactgtcagcagcactacaccacacctccaacctttggccagggcaccaaggtggaaatcaagggaggcggaggatctggcggatctggaagtggcggcggtggatctgcttctggctctggcgaggtgcagctggttgaatctggcggaggactggttcagcctggcggatctctgagactgtcttgtgccgccagcggcttcaacatcaaggacacctacatccactgggtccgacaggcccctggcaaaggacttgaatgggtcgccagaatctaccccaccaacggctacaccagatacgccgactctgtgaagggcagattcaccatcagcgccgacaccagcaagaacaccgcctacctgcagatgaacagcctgagagccgaggacaccgccgtgtactactgtagtagatggggaggcgacggcttctacgccatggattattggggccagggcaccctggtcaccgtttcttctggaggcagctctggcgacatcaagctgcagcagtctggcgccgaacttgctagacctggcgcctctgtgaagatgagctgcaagaccagcggctacaccttcaccagatacaccatgcactgggtcaagcagaggcctggacagggactcgagtggatcggctacatcaaccccagcagaggctacaccaactacaaccagaagttcaaggacaaggccacactgaccaccgacaagagcagcagcacagcctacatgcagctgagcagcctgaccagcgaagatagcgccgtgtactactgcgcccggtactacgacgatcactacagcctggattactggggccagggcacaaccctgacagtgtcatctgctagtggcggctccggatcttctggctgtcctccatgtcctgctccagaagctgctggcggcccttctggccagcctagggaaccccaggtttacacactgcctccaagcagggacgagctgaccaagaatcaggtgtccctgacctgcctcgtgaagggcttttaccccagcgacattgccgtggaatgggagagcaatggccagcctgagaacaactacaagacaacccctcctgtgctggacagcgacggctcattcttcctgtacagcaagctgacagtggacaagtccagatggcagcagggcaacgtgttcagctgcagcgtgatgcacgaggccctgcacaaccactacacccagaagtccctgagcctgtctcctggaggcagcggatcttctggcggaggtggaagtggtggatctggctctggcggttctggatctagcggttcttctggctgtcctccatgtcctgctccagaagctgctggcggcccttctggacagccgcgggaaccccaggtctacaccttgccaccatccagggacgaactgacaaagaatcaagtctctctgacctgcctcgtgaaggggttttaccctagcgacattgccgtcgagtgggagtctaacgggcagcccgaaaacaattataagacaaccccaccagtgctggactccgatggctcattctttctctactctaaactcaccgtggataagtcccggtggcagcaagggaatgtgttttcctgctccgtgatgcatgaagctctccacaatcattacacccaaaagagtctgtctctgagccccggc

SEQ ID NO: 145 - DNA, 2256 bp, synthetic construct
  misc_feature 1..2256: note = Artificial Sequence
  source 1..2256: mol_type = other DNA
gacatccagctgacacagagccctgccatcatgtctgctagccctggcgagaaagtgaccatgacctgtagagccagcagcagcgtgtcctacatgaactggtatcagcagaagtccggcacaagccccaagcggtggatctacgatacaagcaaggtggccagcggcgtgccctacagattttctggctctggcagcggcaccagctacagcctgacaatcagcagcatggaagccgaggatgccgccacctactactgccagcagtggtccagcaatcccctgacatttggagccggcaccaagctggaactgaagggcggatcttctggagacatccagatgacacagagccctagcagcctgtctgccagcgtgggagacagagtgaccatcacctgtagagccagccaggacgtgaacacagccgtggcttggtatcagcagaagcctggcaaggcccctaagctgctgatctacagcgccagctttctgtacagcggcgtgcccagcagattcagcggaagcagaagcggcaccgacttcaccctgaccataagcagtctgcagcccgaggacttcgccacctactactgtcagcagcactacaccacacctccaacctttggccagggcaccaaggtggaaatcaagggaggcggaggatctggcggatctggaagtggcggcggtggatctgcttctggctctggcgaggtgcagctggttgaatctggcggaggactggttcagcctggcggatctctgagactgtcttgtgccgccagcggcttcaacatcaaggacacctacatccactgggtccgacaggcccctggcaaaggacttgaatgggtcgccagaatctaccccaccaacggctacaccagatacgccgactctgtgaagggcagattcaccatcagcgccgacaccagcaagaacaccgcctacctgcagatgaacagcctgagagccgaggacaccgccgtgtactactgtagtagatggggaggcgacggcttctacgccatggattattggggccagggcaccctggtcaccgtttcttctggaggcagctctggcgacatcaagctgcagcagtctggcgccgaacttgctagacctggcgcctctgtgaagatgagctgcaagaccagcggctacaccttcaccagatacaccatgcactgggtcaagcagaggcctggacagggactcgagtggatcggctacatcaaccccagcagaggctacaccaactacaaccagaagttcaaggacaaggccacactgaccaccgacaagagcagcagcacagcctacatgcagctgagcagcctgaccagcgaagatagcgccgtgtactactgcgcccggtactacgacgatcactacagcctggattactggggccagggcacaaccctgacagtgtcatctgctagtggcggctccggatcttgtcctccatgtcctgctccagaagctgctggcggcagttctggccagcctagggaaccccaggtttacacactgcctccaagcagggacgagctgaccaagaatcaggtgtccctgacctgcctcgtgaagggcttttaccccagcgacattgccgtggaatgggagagcaatggccagcctgagaacaactacaagacaacccctcctgtgctggacagcgacggctcattcttcctgtacagcaagctgacagtggacaagtccagatggcagcagggcaacgtgttcagctgcagcgtgatgcacgaggccctgcacaaccactacacccagaagtccctgagcctgtctcctggaggcagcggatcttctggcggaggtggaagtggtggatctggctctggcggttctggatctagcggttcttgtcctccatgtcctgctccagaagctgctggcggcagttctggacagccgcgggaaccccaggtctacaccttgccaccatccagggacgaactgacaaagaatcaagtctctctgacctgcctcgtgaaggggttttaccctagcgacattgccgtcgagtgggagtctaacgggcagcccgaaaacaattataagacaaccccaccagtgctggactccgatggctcattctttctctactctaaactcaccgtggataagtcccggtggcagcaagggaatgtgttttcctgctccgtgatgcatgaagctctccacaatcattacacccaaaagagtctgtctctgagccccggc

SEQ ID NO: 146 - DNA, 3612 bp, synthetic construct
  misc_feature 1..3612: note = Artificial Sequence
  source 1..3612: mol_type = other DNA
gacatccagctgacacagagccctgccatcatgtctgctagccctggcgagaaagtgaccatgacctgtagagccagcagcagcgtgtcctacatgaactggtatcagcagaagtccggcacaagccccaagcggtggatctacgatacaagcaaggtggccagcggcgtgccctacagattttctggctctggcagcggcaccagctacagcctgacaatcagcagcatggaagccgaggatgccgccacctactactgccagcagtggtccagcaatcccctgacatttggagccggcaccaagctggaactgaagggcggatcttctggagacatccagatgacacagagccctagcagcctgtctgccagcgtgggagacagagtgaccatcacctgtagagccagccaggacgtgaacacagccgtggcttggtatcagcagaagcctggcaaggcccctaagctgctgatctacagcgccagctttctgtacagcggcgtgcccagcagattcagcggaagcagaagcggcaccgacttcaccctgaccataagcagtctgcagcccgaggacttcgccacctactactgtcagcagcactacaccacacctccaacctttggccagggcaccaaggtggaaatcaagggaggcggaggatctggcggatctggaagtggcggcggtggatctgcttctggctctggcgaggtgcagctggttgaatctggcggaggactggttcagcctggcggatctctgagactgtcttgtgccgccagcggcttcaacatcaaggacacctacatccactgggtccgacaggcccctggcaaaggacttgaatgggtcgccagaatctaccccaccaacggctacaccagatacgccgactctgtgaagggcagattcaccatcagcgccgacaccagcaagaacaccgcctacctgcagatgaacagcctgagagccgaggacaccgccgtgtactactgtagtagatggggaggcgacggcttctacgccatggattattggggccagggcaccctggtcaccgtttcttctggaggcagctctggcgacatcaagctgcagcagtctggcgccgaacttgctagacctggcgcctctgtgaagatgagctgcaagaccagcggctacaccttcaccagatacaccatgcactgggtcaagcagaggcctggacagggactcgagtggatcggctacatcaaccccagcagaggctacaccaactacaaccagaagttcaaggacaaggccacactgaccaccgacaagagcagcagcacagcctacatgcagctgagcagcctgaccagcgaagatagcgccgtgtactactgcgcccggtactacgacgatcactacagcctggattactggggccagggcacaaccctgacagtgtcatctcgtacggtggccgctcccagcgtgttcatcttcccacctagcgacgagcagctgaagtccggcacagcctctgtcgtgtgcctgctgaacaacttctacccccgcgaggccaaagtgcagtggaaggtggacaacgccctgcagagcggcaacagccaggaaagcgtgaccgagcaggacagcaaggactccacctacagcctgagcagcaccctgacactgagcaaggccgactacgagaagcacaaggtgtacgcctgcgaagtgacccaccagggcctgtctagccccgtgaccaagagcttcaaccggggcgagtgtggtggcggaggtagcggaggcagcggcagcggaggaggcgggagcgccagcggcagcggagcttcgaccaagggcccatccgtgtttcctctggctcccagcagcaagtctacaagcggaggaacagccgctctgggctgcctggtcaaggattactttcccgagcctgtgaccgtgtcctggaattctggcgctctgacaagcggcgtgcacacctttccagctgtgctgcaaagcagcggcctgtactctctgagcagcgtggtcacagtgcctagctctagcctgggcacccagacctacatctgcaatgtgaaccacaagcctagcaacaccaaggtggacaagaaggtggaacccaagagctgcgacaagacccacacctgtcctccatgtcctgctccagaagctgctggcggcccttctgtgttcctgtttcctccaaagcctaaggacaccctgatgatcagcagaacccctgaagtgacctgcgtggtggtggatgtgtctcacgaggaccccgaagtgaagttcaattggtacgtggacggcgtggaagtgcacaacgccaagaccaagcctagagaggaacagtacaacagcacctacagagtggtgtccgtgctgaccgtgctgcaccaggattggctgaacggcaaagagtacaagtgcaaggtgtccaacaaggccctggccgctcctatcgagaaaaccatcagcaaggccaagggccagcctagggagcctcaggtgtacacactgcctccaagcagagatgagctgaccaagaaccaggtgtccctgacctgtctggtcaagggcttctacccctccgatatcgccgtggaatgggagagcaatggccagcctgagaacaactacaagaccacacctcctgtgctggacagcgacggctcattcttcctgtacagcaagctgaccgtggacaagagcagatggcagcagggcaacgtgttcagctgcagcgtgatgcacgaggccctgcacaaccactacacccagaagtccctgtctctgtctcctggcggaggcggaggatctggtagcggtggatctggcggcggatcttcaggtggcggaggaagtggcggcggaggtagcggaggtggtggaagcggaggtggcggatcaggcggcggaggctctgataagacacacacctgtcctccatgtcctgctccagaagctgctggcggcccttccgtgtttctgttccctccaaagcctaaggacaccctgatgatcagccgtacgcctgaagtgacctgcgtggtggtggatgtgtctcacgaagatcccgaagtgaagtttaattggtacgtggacggcgtggaagtgcacaacgccaagaccaagcctagagaggaacagtacaacagcacctacagagtggtgtccgtgctgacagtgctgcaccaggattggctgaacggcaaagagtacaagtgcaaggtgtccaacaaggccctggccgctcctatcgagaaaaccatcagcaaggccaagggccagccaagagaaccccaggtttacaccctgccaccttctagggacgaactcaccaagaatcaagtgtctctcacatgcctcgtgaaggggttttaccccagcgacattgccgtcgagtgggagtccaatggacaacccgagaacaattataagacgaccccaccagtcctggactccgacggctcattctttctctactctaaactcaccgtggataagtcccggtggcagcaagggaatgtgttttcctgctccgtgatgcatgaagctctccacaatcattacacccaaaagagtctgtctctgagccccggc

SEQ ID NO: 147 - DNA, 2946 bp, synthetic construct
  misc_feature 1..2946: note = Artificial Sequence
  source 1..2946: mol_type = other DNA
gacatccagctgacacagagccctgccatcatgtctgctagccctggcgagaaagtgaccatgacctgtagagccagcagcagcgtgtcctacatgaactggtatcagcagaagtccggcacaagccccaagcggtggatctacgatacaagcaaggtggccagcggcgtgccctacagattttctggctctggcagcggcaccagctacagcctgacaatcagcagcatggaagccgaggatgccgccacctactactgccagcagtggtccagcaatcccctgacatttggagccggcaccaagctggaactgaagggcggatcttctggagacatccagatgacacagagccctagcagcctgtctgccagcgtgggagacagagtgaccatcacctgtagagccagccaggacgtgaacacagccgtggcttggtatcagcagaagcctggcaaggcccctaagctgctgatctacagcgccagctttctgtacagcggcgtgcccagcagattcagcggaagcagaagcggcaccgacttcaccctgaccataagcagtctgcagcccgaggacttcgccacctactactgtcagcagcactacaccacacctccaacctttggccagggcaccaaggtggaaatcaagggaggcggaggatctggcggatctggaagtggcggcggtggatctgcttctggctctggcgaggtgcagctggttgaatctggcggaggactggttcagcctggcggatctctgagactgtcttgtgccgccagcggcttcaacatcaaggacacctacatccactgggtccgacaggcccctggcaaaggacttgaatgggtcgccagaatctaccccaccaacggctacaccagatacgccgactctgtgaagggcagattcaccatcagcgccgacaccagcaagaacaccgcctacctgcagatgaacagcctgagagccgaggacaccgccgtgtactactgtagtagatggggaggcgacggcttctacgccatggattattggggccagggcaccctggtcaccgtttcttctggaggcagctctggcgacatcaagctgcagcagtctggcgccgaacttgctagacctggcgcctctgtgaagatgagctgcaagaccagcggctacaccttcaccagatacaccatgcactgggtcaagcagaggcctggacagggactcgagtggatcggctacatcaaccccagcagaggctacaccaactacaaccagaagttcaaggacaaggccacactgaccaccgacaagagcagcagcacagcctacatgcagctgagcagcctgaccagcgaagatagcgccgtgtactactgcgcccggtactacgacgatcactacagcctggattactggggccagggcacaaccctgacagtgtcatctcgtacggtggccgctcccagcgtgttcatcttcccacctagcgacgagcagctgaagtccggcacagcctctgtcgtgtgcctgctgaacaacttctacccccgcgaggccaaagtgcagtggaaggtggacaacgccctgcagagcggcaacagccaggaaagcgtgaccgagcaggacagcaaggactccacctacagcctgagcagcaccctgacactgagcaaggccgactacgagaagcacaaggtgtacgcctgcgaagtgacccaccagggcctgtctagccccgtgaccaagagcttcaaccggggcgagtgtggtggcggaggtagcggaggcagcggcagcggaggaggcgggagcgccagcggcagcggagcttcgaccaagggcccatccgtgtttcctctggctcccagcagcaagtctacaagcggaggaacagccgctctgggctgcctggtcaaggattactttcccgagcctgtgaccgtgtcctggaattctggcgctctgacaagcggcgtgcacacctttccagctgtgctgcaaagcagcggcctgtactctctgagcagcgtggtcacagtgcctagctctagcctgggcacccagacctacatctgcaatgtgaaccacaagcctagcaacaccaaggtggacaagaaggtggaacccaagagctgcgataagacccacacatgtcctccatgtcctgctccagaagctgctggcggcccttctggccagcctagggaaccccaggtttacacactgcctccaagcagggacgagctgaccaagaatcaggtgtccctgacctgcctcgtgaagggcttttaccccagcgacattgccgtggaatgggagagcaatggccagcctgagaacaactacaagacaacccctcctgtgctggacagcgacggctcattcttcctgtacagcaagctgacagtggacaagtccagatggcagcagggcaacgtgttcagctgcagcgtgatgcacgaggccctgcacaaccactacacccagaagtccctgagcctgtctcctggaggcagcggatcttctggcggaggtggaagtggtggatctggctctggcggttctggatctagcggttcttctggctgtcctccatgtcctgctccagaagctgctggcggcccttctggacagccgcgggaaccccaggtctacaccttgccaccatccagggacgaactgacaaagaatcaagtctctctgacctgcctcgtgaaggggttttaccctagcgacattgccgtcgagtgggagtctaacgggcagcccgaaaacaattataagacaaccccaccagtgctggactccgatggctcattctttctctactctaaactcaccgtggataagtcccggtggcagcaagggaatgtgttttcctgctccgtgatgcatgaagctctccacaatcattacacccaaaagagtctgtctctgagccccggc

SEQ ID NO: 148 - protein, 490 aa, synthetic construct; identical to SEQ ID NO: 32
  REGION 1..490: note = Artificial Sequence

SEQ ID NO: 149 - protein, 502 aa, synthetic construct; identical to SEQ ID NO: 33
  REGION 1..502: note = Artificial Sequence

SEQ ID NO: 150 - protein, 722 aa, synthetic construct; identical to SEQ ID NO: 34
  REGION 1..722: note = Artificial Sequence

SEQ ID NO: 151 - protein, 722 aa, synthetic construct; identical to SEQ ID NO: 35
  REGION 1..722: note = Artificial Sequence

SEQ ID NO: 152 - protein, 722 aa, synthetic construct; identical to SEQ ID NO: 36
  REGION 1..722: note = Artificial Sequence

SEQ ID NO: 153 - protein, 722 aa, synthetic construct; identical to SEQ ID NO: 37
  REGION 1..722: note = Artificial Sequence

SEQ ID NO: 154 - protein, 714 aa, synthetic construct; identical to SEQ ID NO: 38
  REGION 1..714: note = Artificial Sequence

SEQ ID NO: 155 - protein, 714 aa, synthetic construct; identical to SEQ ID NO: 39
  REGION 1..714: note = Artificial Sequence

SEQ ID NO: 156 - protein, 721 aa, synthetic construct; identical to SEQ ID NO: 42
  REGION 1..721: note = Artificial Sequence

SEQ ID NO: 157 - protein, 721 aa, synthetic construct; identical to SEQ ID NO: 43
  REGION 1..721: note = Artificial Sequence

SEQ ID NO: 158 - protein, 480 aa, synthetic construct
  REGION 1..480: note = Artificial Sequence
DIQMTQSPSSLSASVGDRVTITCHASQNIYVWLNWYQQKPGKAPKLLIYKASNLHTGVPSRFSGSGSGTDFTLTISSLQPEDFATYYCQQGQTYPYTFGGGTKVEIKGDIQLTQSPAIMSASPGEKVTMTCRASSSVSYMNWYQQKSGTSPKRWIYDTSKVASGVPYRFSGSGSGTSYSLTISSMEAEDAATYYCQQWSSNPLTFGAGTKLELKGGGGSGGSGSGGGGSASGSGDIKLQQSGAELARPGASVKMSCKTSGYTFTRYTMHWVKQRPGQGLEWIGYINPSRGYTNYNQKFKDKATLTTDKSSSTAYMQLSSLTSEDSAVYYCARYYDDHYSLDYWGQGTTLTVSSGQVQLVQSGAEVKKPGASVKVSCKASGYTFTSYYIHWVRQAPGQGLEWIGSIYPGNVNTNYNEKFKDRATLTVDTSISTAYMELSRLRSDDTAVYFCTRSHYGLDWNFDVWGQGTTVTVSSASGGSG

SEQ ID NO: 159 - protein, 498 aa, synthetic construct
  REGION 1..498: note = Artificial Sequence
DIQMTQSPSSLSASVGDRVTITCHASQNIYVWLNWYQQKPGKAPKLLIYKASNLHTGVPSRFSGSGSGTDFTLTISSLQPEDFATYYCQQGQTYPYTFGGGTKVEIKSGGSGSSGGSDIQLTQSPAIMSASPGEKVTMTCRASSSVSYMNWYQQKSGTSPKRWIYDTSKVASGVPYRFSGSGSGTSYSLTISSMEAEDAATYYCQQWSSNPLTFGAGTKLELKGGGGSGGSGSGGGGSASGSGDIKLQQSGAELARPGASVKMSCKTSGYTFTRYTMHWVKQRPGQGLEWIGYINPSRGYTNYNQKFKDKATLTTDKSSSTAYMQLSSLTSEDSAVYYCARYYDDHYSLDYWGQGTTLTVSSGGSGGSSGSSQVQLVQSGAEVKKPGASVKVSCKASGYTFTSYYIHWVRQAPGQGLEWIGSIYPGNVNTNYNEKFKDRATLTVDTSISTAYMELSRLRSDDTAVYFCTRSHYGLDWNFDVWGQGTTVTVSSASGGSG

SEQ ID NO: 160 - protein, 595 aa, synthetic construct
  REGION 1..595: note = Artificial Sequence
DIQMTQSPSSLSASVGDRVTITCHASQNIYVWLNWYQQKPGKAPKLLIYKASNLHTGVPSRFSGSGSGTDFTLTISSLQPEDFATYYCQQGQTYPYTFGGGTKVEIKGGSSGDIQLTQSPAIMSASPGEKVTMTCRASSSVSYMNWYQQKSGTSPKRWIYDTSKVASGVPYRFSGSGSGTSYSLTISSMEAEDAATYYCQQWSSNPLTFGAGTKLELKGGGGSGGSGSGGGGSASGSGDIKLQQSGAELARPGASVKMSCKTSGYTFTRYTMHWVKQRPGQGLEWIGYINPSRGYTNYNQKFKDKATLTTDKSSSTAYMQLSSLTSEDSAVYYCARYYDDHYSLDYWGQGTTLTVSSGGSSGQVQLVQSGAEVKKPGASVKVSCKASGYTFTSYYIHWVRQAPGQGLEWIGSIYPGNVNTNYNEKFKDRATLTVDTSISTAYMELSRLRSDDTAVYFCTRSHYGLDWNFDVWGQGTTVTVSSASTKGPSVFPLAPSSKSTSGGTAALGCLVKDYFPEPVTVSWNSGALTSGVHTFPAVLQSSGLYSLSSVVTVPSSSLGTQTYICNVNHKPSNTKVDKKVEPKSCDKTHTCPPCP

SEQ ID NO: 161 - protein, 595 aa, synthetic construct
  REGION 1..595: note = Artificial Sequence
DIQMTQSPSSLSASVGDRVTITCHASQNIYVWLNWYQQKPGKAPKLLIYKASNLHTGVPSRFSGSGSGTDFTLTISSLQPEDFATYYCQQGQTYPYTFGGGTKVEIKGGSSGDIQLTQSPAIMSASPGEKVTMTCRASSSVSYMNWYQQKSGTSPKRWIYDTSKVASGVPYRFSGSGSGTSYSLTISSMEAEDAATYYCQQWSSNPLTFGAGTKLELKGGGGSGGSGSGGGGSASGSGDIKLQQSGAELARPGASVKMSCKTSGYTFTRYTMHWVKQRPGQGLEWIGYINPSRGYTNYNQKFKDKATLTTDKSSSTAYMQLSSLTSEDSAVYYCARYYDDHYSLDYWGQGTTLTVSSGGSSGQVQLVQSGAEVKKPGASVKVSCKASGYTFTSYYIHWVRQAPGQGLEWIGSIYPGNVNTNYNEKFKDRATLTVDTSISTAYMELSRLRSDDTAVYFCTRSHYGLDWNFDVWGQGTTVTVSSASTKGPSVFPLAPSSKSTSGGTAALGCLVKDYFPEPVTVSWNSGALTSGVHTFPAVLQSSGLYSLSSVVTVPSSSLGTQTYICNVNHKPSNTKVDKKVEPKSSDKTHTCPPCP

SEQ ID NO: 162 - protein, 597 aa, synthetic construct
  REGION 1..597: note = Artificial Sequence
DIQMTQSPSSLSASVGDRVTITCHASQNIYVWLNWYQQKPGKAPKLLIYKASNLHTGVPSRFSGSGSGTDFTLTISSLQPEDFATYYCQQGQTYPYTFGGGTKVEIKGGSSGDIQLTQSPAIMSASPGEKVTMTCRASSSVSYMNWYQQKSGTSPKRWIYDTSKVASGVPYRFSGSGSGTSYSLTISSMEAEDAATYYCQQWSSNPLTFGAGTKLELKGGGGSGGSGSGGGGSASGSGDIKLQQSGAELARPGASVKMSCKTSGYTFTRYTMHWVKQRPGQGLEWIGYINPSRGYTNYNQKFKDKATLTTDKSSSTAYMQLSSLTSEDSAVYYCARYYDDHYSLDYWGQGTTLTVSSGGSSGQVQLVQSGAEVKKPGASVKVSCKASGYTFTSYYIHWVRQAPGQGLEWIGSIYPGNVNTNYNEKFKDRATLTVDTSISTAYMELSRLRSDDTAVYFCTRSHYGLDWNFDVWGQGTTVTVSSASTKGPSVFPLAPSSKSTSGGTAALGCLVKDYFPEPVTVSWNSGALTSGVHTFPAVLQSSGLYSLSSVVTVPSSSLGTQTYICNVNHKPSNTKVDKKVEPKTPLGDTTHTCPPCP

SEQ ID NO: 163 - protein, 598 aa, synthetic construct
  REGION 1..598: note = Artificial Sequence
DIQMTQSPSSLSASVGDRVTITCHASQNIYVWLNWYQQKPGKAPKLLIYKASNLHTGVPSRFSGSGSGTDFTLTISSLQPEDFATYYCQQGQTYPYTFGGGTKVEIKGGSSGDIQLTQSPAIMSASPGEKVTMTCRASSSVSYMNWYQQKSGTSPKRWIYDTSKVASGVPYRFSGSGSGTSYSLTISSMEAEDAATYYCQQWSSNPLTFGAGTKLELKGGGGSGGSGSGGGGSASGSGDIKLQQSGAELARPGASVKMSCKTSGYTFTRYTMHWVKQRPGQGLEWIGYINPSRGYTNYNQKFKDKATLTTDKSSSTAYMQLSSLTSEDSAVYYCARYYDDHYSLDYWGQGTTLTVSSGGSSGQVQLVQSGAEVKKPGASVKVSCKASGYTFTSYYIHWVRQAPGQGLEWIGSIYPGNVNTNYNEKFKDRATLTVDTSISTAYMELSRLRSDDTAVYFCTRSHYGLDWNFDVWGQGTTVTVSSGSSASTKGPSVFPLAPSSKSTSGGTAALGCLVKDYFPEPVTVSWNSGALTSGVHTFPAVLQSSGLYSLSSVVTVPSSSLGTQTYICNVNHKPSNTKVDKKVEPKSCDKTHTCPPCP

SEQ ID NO: 164 - protein, 600 aa, synthetic construct
  REGION 1..600: note = Artificial Sequence
DIQMTQSPSSLSASVGDRVTITCHASQNIYVWLNWYQQKPGKAPKLLIYKASNLHTGVPSRFSGSGSGTDFTLTISSLQPEDFATYYCQQGQTYPYTFGGGTKVEIKGGSSGDIQLTQSPAIMSASPGEKVTMTCRASSSVSYMNWYQQKSGTSPKRWIYDTSKVASGVPYRFSGSGSGTSYSLTISSMEAEDAATYYCQQWSSNPLTFGAGTKLELKGGGGSGGSGSGGGGSASGSGDIKLQQSGAELARPGASVKMSCKTSGYTFTRYTMHWVKQRPGQGLEWIGYINPSRGYTNYNQKFKDKATLTTDKSSSTAYMQLSSLTSEDSAVYYCARYYDDHYSLDYWGQGTTLTVSSGGSSGQVQLVQSGAEVKKPGASVKVSCKASGYTFTSYYIHWVRQAPGQGLEWIGSIYPGNVNTNYNEKFKDRATLTVDTSISTAYMELSRLRSDDTAVYFCTRSHYGLDWNFDVWGQGTTVTVSSGSSGSASTKGPSVFPLAPSSKSTSGGTAALGCLVKDYFPEPVTVSWNSGALTSGVHTFPAVLQSSGLYSLSSVVTVPSSSLGTQTYICNVNHKPSNTKVDKKVEPKSCDKTHTCPPCP

SEQ ID NO: 165 - protein, 488 aa, synthetic construct
  REGION 1..488: note = Artificial Sequence
DIKLQQSGAELARPGASVKMSCKTSGYTFTRYTMHWVKQRPGQGLEWIGYINPSRGYTNYNQKFKDKATLTTDKSSSTAYMQLSSLTSEDSAVYYCARYYDDHYSLDYWGQGTTLTVSSGGSSGQVQLVQSGAEVKKPGASVKVSCKASGYTFTSYYIHWVRQAPGQGLEWIGSIYPGNVNTNYNEKFKDRATLTVDTSISTAYMELSRLRSDDTAVYFCTRSHYGLDWNFDVWGQGTTVTVSSGGGGSGGSGSGGGGSASGSGDIQMTQSPSSLSASVGDRVTITCHASQNIYVWLNWYQQKPGKAPKLLIYKASNLHTGVPSRFSGSGSGTDFTLTISSLQPEDFATYYCQQGQTYPYTFGGGTKVEIKGGSSGDIQLTQSPAIMSASPGEKVTMTCRASSSVSYMNWYQQKSGTSPKRWIYDTSKVASGVPYRFSGSGSGTSYSLTISSMEAEDAATYYCQQWSSNPLTFGAGTKLELKASGGSG

SEQ ID NO: 166 - protein, 488 aa, synthetic construct
  REGION 1..488: note = Artificial Sequence
QVQLVQSGAEVKKPGASVKVSCKASGYTFTSYYIHWVRQAPGQGLEWIGSIYPGNVNTNYNEKFKDRATLTVDTSISTAYMELSRLRSDDTAVYFCTRSHYGLDWNFDVWGQGTTVTVSSGGSSGDIKLQQSGAELARPGASVKMSCKTSGYTFTRYTMHWVKQRPGQGLEWIGYINPSRGYTNYNQKFKDKATLTTDKSSSTAYMQLSSLTSEDSAVYYCARYYDDHYSLDYWGQGTTLTVSSGGGGSGGSGSGGGGSASGSGDIQLTQSPAIMSASPGEKVTMTCRASSSVSYMNWYQQKSGTSPKRWIYDTSKVASGVPYRFSGSGSGTSYSLTISSMEAEDAATYYCQQWSSNPLTFGAGTKLELKGGSSGDIQMTQSPSSLSASVGDRVTITCHASQNIYVWLNWYQQKPGKAPKLLIYKASNLHTGVPSRFSGSGSGTDFTLTISSLQPEDFATYYCQQGQTYPYTFGGGTKVEIKASGGSG

SEQ ID NO: 167 - protein, 483 aa, synthetic construct
  REGION 1..483: note = Artificial Sequence
DIVLTQSPATLSLSPGERATISCRASQSVSSYGQGFMHWYQQKPGQPPRLLIYGASSRATGIPARFSGSGSGTDFTLTISPLEPEDFAVYYCQQNKEDPWTFGGGTKLEIKGGGGSGGSGSGGGGSASGSGQVQLVQSGAEVVKPGASVKVSCKASGYTFTSYAMHWVKEAPGQRLEWIGYIYPGQGGTNYNQKFQGRATLTADTSASTAYMELSSLRSEDTAVYFCARTGGLRRAYFTYWGQGTLVTVSSASGGSGDKTHTCPPCPAPEAAGGPSVFLFPPKPKDTLMISRTPEVTCVVVDVSHEDPEVKFNWYVDGVEVHNAKTKPREEQYNSTYRVVSVLTVLHQDWLNGKEYKCKVSNKALAAPIEKTISKAKGQPREPQVYTLPPCRDELTKNQVSLWCLVKGFYPSDIAVEWESNGQPENNYKTTPPVLDSDGSFFLYSKLTVDKSRWQQGNVFSCSVMHEALHNHYTQKSLSLSPG

SEQ ID NO: 168 - protein, 449 aa, synthetic construct
  REGION 1..449: note = Artificial Sequence
QVQLVQSGAEVVKPGASVKVSCKASGYTFTSYAMHWVKEAPGQRLEWIGYIYPGQGGTNYNQKFQGRATLTADTSASTAYMELSSLRSEDTAVYFCARTGGLRRAYFTYWGQGTLVTVSSASTKGPSVFPLAPSSKSTSGGTAALGCLVKDYFPEPVTVSWNSGALTSGVHTFPAVLQSSGLYSLSSVVTVPSSSLGTQTYICNVNHKPSNTKVDKKVEPKSCDKTHTCPPCPAPEAAGGPSVFLFPPKPKDTLMISRTPEVTCVVVDVSHEDPEVKFNWYVDGVEVHNAKTKPREEQYNSTYRVVSVLTVLHQDWLNGKEYKCKVSNKALAAPIEKTISKAKGQPREPQVYTLPPCRDELTKNQVSLWCLVKGFYPSDIAVEWESNGQPENNYKTTPPVLDSDGSFFLYSKLTVDKSRWQQGNVFSCSVMHEALHNHYTQKSLSLSPG

SEQ ID NO: 169 - protein, 218 aa, synthetic construct
  REGION 1..218: note = Artificial Sequence
DIVLTQSPATLSLSPGERATISCRASQSVSSYGQGFMHWYQQKPGQPPRLLIYGASSRATGIPARFSGSGSGTDFTLTISPLEPEDFAVYYCQQNKEDPWTFGGGTKLEIKRTVAAPSVFIFPPSDEQLKSGTASVVCLLNNFYPREAKVQWKVDNALQSGNSQESVTEQDSKDSTYSLSSTLTLSKADYEKHKVYACEVTHQGLSSPVTKSFNRGEC

SEQ ID NO: 170 - protein, 487 aa, synthetic construct
  REGION 1..487: note = Artificial Sequence
DIQLTQSPASLAVSLGQRATISCKASQSVDYDGDSYLNWYQQIPGQPPKLLIYDASNLVSGIPPRFSGSGSGTDFTLNIHPVEKVDAATYHCQQSTEDPWTFGGGTKLEIKGGGGSGGSGSGGGGSASGSGQVQLQQSGAELVRPGSSVKISCKASGYAFSSYWMNWVKQRPGQGLEWIGQIWPGDGDTNYNGKFKGKATLTADESSSTAYMQLSSLASEDSAVYFCARRETTTVGRYYYAMDYWGQGTTVTVSSASGGSGDKTHTCPPCPAPEAAGGPSVFLFPPKPKDTLMISRTPEVTCVVVDVSHEDPEVKFNWYVDGVEVHNAKTKPREEQYNSTYRVVSVLTVLHQDWLNGKEYKCKVSNKALAAPIEKTISKAKGQPREPQVYTLPPCRDELTKNQVSLWCLVKGFYPSDIAVEWESNGQPENNYKTTPPVLDSDGSFFLYSKLTVDKSRWQQGNVFSCSVMHEALHNHYTQKSLSLSPG

SEQ ID NO: 171 - protein, 453 aa, synthetic construct
  REGION 1..453: note = Artificial Sequence
QVQLQQSGAELVRPGSSVKISCKASGYAFSSYWMNWVKQRPGQGLEWIGQIWPGDGDTNYNGKFKGKATLTADESSSTAYMQLSSLASEDSAVYFCARRETTTVGRYYYAMDYWGQGTTVTVSSASTKGPSVFPLAPSSKSTSGGTAALGCLVKDYFPEPVTVSWNSGALTSGVHTFPAVLQSSGLYSLSSVVTVPSSSLGTQTYICNVNHKPSNTKVDKKVEPKSCDKTHTCPPCPAPEAAGGPSVFLFPPKPKDTLMISRTPEVTCVVVDVSHEDPEVKFNWYVDGVEVHNAKTKPREEQYNSTYRVVSVLTVLHQDWLNGKEYKCKVSNKALAAPIEKTISKAKGQPREPQVYTLPPCRDELTKNQVSLWCLVKGFYPSDIAVEWESNGQPENNYKTTPPVLDSDGSFFLYSKLTVDKSRWQQGNVFSCSVMHEALHNHYTQKSLSLSPG

SEQ ID NO: 172 - protein, 218 aa, synthetic construct
  REGION 1..218: note = Artificial Sequence
DIQLTQSPASLAVSLGQRATISCKASQSVDYDGDSYLNWYQQIPGQPPKLLIYDASNLVSGIPPRFSGSGSGTDFTLNIHPVEKVDAATYHCQQSTEDPWTFGGGTKLEIKRTVAAPSVFIFPPSDEQLKSGTASVVCLLNNFYPREAKVQWKVDNALQSGNSQESVTEQDSKDSTYSLSSTLTLSKADYEKHKVYACEVTHQGLSSPVTKSFNRGEC

SEQ ID NO: 173 - protein, 490 aa, synthetic construct
  REGION 1..490: note = Artificial Sequence
DIVLTQSPATLSLSPGERATISCRASQSVSSYGQGFMHWYQQKPGQPPRLLIYGASSRATGIPARFSGSGSGTDFTLTISPLEPEDFAVYYCQQNKEDPWTFGGGTKLEIKRTVAAPSVFIFPPSDEQLKSGTASVVCLLNNFYPREAKVQWKVDNALQSGNSQESVTEQDSKDSTYSLSSTLTLSKADYEKHKVYACEVTHQGLSSPVTKSFNRGECGGGGSGGGGSGGGGSGGGGSGGGGSGGGGSGGGGSGGGGSQVQLVQSGAEVVKPGASVKVSCKASGYTFTSYAMHWVKEAPGQRLEWIGYIYPGQGGTNYNQKFQGRATLTADTSASTAYMELSSLRSEDTAVYFCARTGGLRRAYFTYWGQGTLVTVSSASTKGPSVFPLAPSSKSTSGGTAALGCLVKDYFPEPVTVSWNSGALTSGVHTFPAVLQSSGLYSLSSVVTVPSSSLGTQTYICNVNHKPSNTKVDKKVEPKSCDKTHTCPPC

SEQ ID NO: 174 - protein, 490 aa, synthetic construct
  REGION 1..490: note = Artificial Sequence
QVQLVQSGAEVVKPGASVKVSCKASGYTFTSYAMHWVKEAPGQRLEWIGYIYPGQGGTNYNQKFQGRATLTADTSASTAYMELSSLRSEDTAVYFCARTGGLRRAYFTYWGQGTLVTVSSGGGGSGGSGSGGGGSASGSGDIVLTQSPATLSLSPGERATISCRASQSVSSYGQGFMHWYQQKPGQPPRLLIYGASSRATGIPARFSGSGSGTDFTLTISPLEPEDFAVYYCQQNKEDPWTFGGGTKLEIKRTVAAPSVFIFPPSDEQLKSGTASVVCLLNNFYPREAKVQWKVDNALQSGNSQESVTEQDSKDSTYSLSSTLTLSKADYEKHKVYACEVTHQGLSSPVTKSFNRGECGGGGSGGSGSGGGGSASGSGASTKGPSVFPLAPSSKSTSGGTAALGCLVKDYFPEPVTVSWNSGALTSGVHTFPAVLQSSGLYSLSSVVTVPSSSLGTQTYICNVNHKPSNTKVDKKVEPKSCDKTHTCPPC

SEQ ID NO: 175 - protein, 487 aa, synthetic construct
  REGION 1..487: note = Artificial Sequence
QVQLVQSGAEVVKPGASVKVSCKASGYTFTSYAMHWVKEAPGQRLEWIGYIYPGQGGTNYNQKFQGRATLTADTSASTAYMELSSLRSEDTAVYFCARTGGLRRAYFTYWGQGTLVTVSSGGGGSGGSGSGGGGSASGSGDIVLTQSPATLSLSPGERATISCRASQSVSSYGQGFMHWYQQKPGQPPRLLIYGASSRATGIPARFSGSGSGTDFTLTISPLEPEDFAVYYCQQNKEDPWTFGGGTKLEIKRTVAAPSVFIFPPSDEQLKSGTASVVCLLNNFYPREAKVQWKVDNALQSGNSQESVTEQDSKDSTYSLSSTLTLSKADYEKHKVYACEVTHQGLSSPVTKSFNRGECGGSGGSGSGGGSASGSGASTKGPSVFPLAPSSKSTSGGTAALGCLVKDYFPEPVTVSWNSGALTSGVHTFPAVLQSSGLYSLSSVVTVPSSSLGTQTYICNVNHKPSNTKVDKKVEPKSCDKTHTCPPC

SEQ ID NO: 176 - protein, 372 aa, synthetic construct
  REGION 1..372: note = Artificial Sequence
DIQLTQSPASLAVSLGQRATISCKASQSVDYDGDSYLNWYQQIPGQPPKLLIYDASNLVSGIPPRFSGSGSGTDFTLNIHPVEKVDAATYHCQQSTEDPWTFGGGTKLEIKGGGGSGGSGSGGGGSASGSGQVQLQQSGAELVRPGSSVKISCKASGYAFSSYWMNWVKQRPGQGLEWIGQIWPGDGDTNYNGKFKGKATLTADESSSTAYMQLSSLASEDSAVYFCARRETTTVGRYYYAMDYWGQGTTVTVSSATVAAPSVFIFPPSDEQLKSGTASVVCLLNNFYPREAKVQWKVDNALQSGNSQESVTEQDSKDSTYSLSSTLTLSKADYEKHKVYACEVTHQGLSSPVTKSFNRGECDKTHTCPPCP

SEQ ID NO: 177 - protein, 366 aa, synthetic construct
  REGION 1..366: note = Artificial Sequence
EIVLTQSPATLSLSPGERATLSCRASQSVSSYLAWYQQKPGQAPRLLIYDASNRATGIPARFSGSGSGTDFTLTISSLEPEDFAVYYCQQRSNWPPTFGQGTKVEIKGGGGSGGSGSGGGGSASGSGEVQLLESGGGLVQPGGSLRLSCAVSGFTFNSFAMSWVRQAPGKGLEWVSAISGSGGGTYYADSVKGRFTISRDNSKNTLYLQMNSLRAEDTAVYFCAKDKILWFGEPVFDYWGQGTLVTVSSATVAAPSVFIFPPSDEQLKSGTASVVCLLNNFYPREAKVQWKVDNALQSGNSQESVTEQDSKDSTYSLSSTLTLSKADYEKHKVYACEVTHQGLSSPVTKSFNRGECDKTHTCPPCP

SEQ ID NO: 178 - protein, 376 aa, synthetic construct
  REGION 1..376: note = Artificial Sequence
DIQLTQSPASLAVSLGQRATISCKASQSVDYDGDSYLNWYQQIPGQPPKLLIYDASNLVSGIPPRFSGSGSGTDFTLNIHPVEKVDAATYHCQQSTEDPWTFGGGTKLEIKGGGGSGGSGSGGGGSASGSGQVQLQQSGAELVRPGSSVKISCKASGYAFSSYWMNWVKQRPGQGLEWIGQIWPGDGDTNYNGKFKGKATLTADESSSTAYMQLSSLASEDSAVYFCARRETTTVGRYYYAMDYWGQGTTVTVSSASGGSTVAAPSVFIFPPSDEQLKSGTASVVCLLNNFYPREAKVQWKVDNALQSGNSQESVTEQDSKDSTYSLSSTLTLSKADYEKHKVYACEVTHQGLSSPVTKSFNRGECDKTHTCPPCP

SEQ ID NO: 179 - protein, 370 aa, synthetic construct
  REGION 1..370: note = Artificial Sequence
EIVLTQSPATLSLSPGERATLSCRASQSVSSYLAWYQQKPGQAPRLLIYDASNRATGIPARFSGSGSGTDFTLTISSLEPEDFAVYYCQQRSNWPPTFGQGTKVEIKGGGGSGGSGSGGGGSASGSGEVQLLESGGGLVQPGGSLRLSCAVSGFTFNSFAMSWVRQAPGKGLEWVSAISGSGGGTYYADSVKGRFTISRDNSKNTLYLQMNSLRAEDTAVYFCAKDKILWFGEPVFDYWGQGTLVTVSSASGGSTVAAPSVFIFPPSDEQLKSGTASVVCLLNNFYPREAKVQWKVDNALQSGNSQESVTEQDSKDSTYSLSSTLTLSKADYEKHKVYACEVTHQGLSSPVTKSFNRGECDKTHTCPPCP

SEQ ID NO: 180 - protein, 595 aa, synthetic construct; identical to SEQ ID NO: 160
  REGION 1..595: note = Artificial Sequence

SEQ ID NO: 181 - protein, 600 aa, synthetic construct; identical to SEQ ID NO: 164
  REGION 1..600: note = Artificial Sequence

SEQ ID NO: 182 - protein, 750 aa, synthetic construct
  REGION 1..750: note = Artificial Sequence
DIQMTQSPSSLSASVGDRVTITCQASQNIYVWLNWYQQKPGKAPKLLIYKASNLHTGVPSRFSGSGSGTDFTLTISSLQPEDIATYYCQQGQTYPYTFGQGTKLEIKGGSSGDIVMTQTPLSLSVTPGQPASISCKSSQSLVHNNANTYLSWYLQKPGQSPQSLIYKVSNRFSGVPDRFSGSGSGTDFTLKISRVEAEDVGVYYCGQGTQYPFTFGSGTKVEIKGGSSGDIVLTQSPATLSLSPGERATISCRASQSVSSYGQGFMHWYQQKPGQPPRLLIYGASSRATGIPARFSGSGSGTDFTLTISPLEPEDFAVYYCQQNKEDPWTFGGGTKLEIKGGGGSGGSGSGGGGSASGSGQVQLVQSGAEVVKPGASVKVSCKASGYTFTSYAMHWVKEAPGQGLEWIGYIYPGQGGTNYNQKFQGRATLTADTSASTAYMELSSLRSEDTAVYFCARTGGLRRAYFTYWGQGTLVTVSSGGSSGQVQLVESGGGVVQPGRSLRLSCAASGFTFTKAWMHWVRQAPGKQLEWVAQIKDKSNSYATYYADSVKGRFTISRDDSKNTLYLQMNSLRAEDTAVYYCRGVYYALSPFDYWGQGTLVTVSSGGSSGQVQLVQSGAEVVKPGASVKVSCKASGYTFTSYYIHWVRQAPGQGLEWIGSIYPGNVNTNYAQKFQGRATLTVDTSISTAYMELSRLRSDDTAVYYCTRSHYGLDWNFDVWGKGTTVTVSSASGGSGDKTHTCPPCPAPE

SEQ ID NO: 183 - protein, 750 aa, synthetic construct
  REGION 1..750: note = Artificial Sequence
DIQMTQSPSSLSASVGDRVTITCQASQNIYVWLNWYQQKPGKAPKLLIYKASNLHTGVPSRFSGSGSGTDFTLTISSLQPEDIATYYCQQGQTYPYTFGQGTKLEIKGGSSGQVQLVESGGGVVQPGRSLRLSCAASGFTFTKAWMHWVRQAPGKQLEWVAQIKDKSNSYATYYADSVKGRFTISRDDSKNTLYLQMNSLRAEDTAVYYCRGVYYALSPFDYWGQGTLVTVSSGGSSGDIVLTQSPATLSLSPGERATISCRASQSVSSYGQGFMHWYQQKPGQPPRLLIYGASSRATGIPARFSGSGSGTDFTLTISPLEPEDFAVYYCQQNKEDPWTFGGGTKLEIKGGGGSGGSGSGGGGSASGSGQVQLVQSGAEVVKPGASVKVSCKASGYTFTSYAMHWVKEAPGQGLEWIGYIYPGQGGTNYNQKFQGRATLTADTSASTAYMELSSLRSEDTAVYFCARTGGLRRAYFTYWGQGTLVTVSSGGSSGDIVMTQTPLSLSVTPGQPASISCKSSQSLVHNNANTYLSWYLQKPGQSPQSLIYKVSNRFSGVPDRFSGSGSGTDFTLKISRVEAEDVGVYYCGQGTQYPFTFGSGTKVEIKGGSSGQVQLVQSGAEVVKPGASVKVSCKASGYTFTSYYIHWVRQAPGQGLEWIGSIYPGNVNTNYAQKFQGRATLTVDTSISTAYMELSRLRSDDTAVYYCTRSHYGLDWNFDVWGKGTTVTVSSASGGSGDKTHTCPPCPAPE

SEQ ID NO: 184 - protein, 750 aa, synthetic construct
  REGION 1..750: note = Artificial Sequence
DIVMTQTPLSLSVTPGQPASISCKSSQSLVHNNANTYLSWYLQKPGQSPQSLIYKVSNRFSGVPDRFSGSGSGTDFTLKISRVEAEDVGVYYCGQGTQYPFTFGSGTKVEIKGGSSGDIQMTQSPSSLSASVGDRVTITCQASQNIYVWLNWYQQKPGKAPKLLIYKASNLHTGVPSRFSGSGSGTDFTLTISSLQPEDIATYYCQQGQTYPYTFGQGTKLEIKGGSSGDIVLTQSPATLSLSPGERATISCRASQSVSSYGQGFMHWYQQKPGQPPRLLIYGASSRATGIPARFSGSGSGTDFTLTISPLEPEDFAVYYCQQNKEDPWTFGGGTKLEIKGGGGSGGSGSGGGGSASGSGQVQLVQSGAEVVKPGASVKVSCKASGYTFTSYAMHWVKEAPGQGLEWIGYIYPGQGGTNYNQKFQGRATLTADTSASTAYMELSSLRSEDTAVYFCARTGGLRRAYFTYWGQGTLVTVSSGGSSGQVQLVQSGAEVVKPGASVKVSCKASGYTFTSYYIHWVRQAPGQGLEWIGSIYPGNVNTNYAQKFQGRATLTVDTSISTAYMELSRLRSDDTAVYYCTRSHYGLDWNFDVWGKGTTVTVSSGGSSGQVQLVESGGGVVQPGRSLRLSCAASGFTFTKAWMHWVRQAPGKQLEWVAQIKDKSNSYATYYADSVKGRFTISRDDSKNTLYLQMNSLRAEDTAVYYCRGVYYALSPFDYWGQGTLVTVSSASGGSGDKTHTCPPCPAPE

SEQ ID NO: 185 - protein, 750 aa, synthetic construct
  REGION 1..750: note = Artificial Sequence
DIVMTQTPLSLSVTPGQPASISCKSSQSLVHNNANTYLSWYLQKPGQSPQSLIYKVSNRFSGVPDRFSGSGSGTDFTLKISRVEAEDVGVYYCGQGTQYPFTFGSGTKVEIKGGSSGDIVLTQSPATLSLSPGERATISCRASQSVSSYGQGFMHWYQQKPGQPPRLLIYGASSRATGIPARFSGSGSGTDFTLTISPLEPEDFAVYYCQQNKEDPWTFGGGTKLEIKGGSSGDIQMTQSPSSLSASVGDRVTITCQASQNIYVWLNWYQQKPGKAPKLLIYKASNLHTGVPSRFSGSGSGTDFTLTISSLQPEDIATYYCQQGQTYPYTFGQGTKLEIKGGGGSGGSGSGGGGSASGSGQVQLVQSGAEVVKPGASVKVSCKASGYTFTSYYIHWVRQAPGQGLEWIGSIYPGNVNTNYAQKFQGRATLTVDTSISTAYMELSRLRSDDTAVYYCTRSHYGLDWNFDVWGKGTTVTVSSGGSSGQVQLVQSGAEVVKPGASVKVSCKASGYTFTSYAMHWVKEAPGQGLEWIGYIYPGQGGTNYNQKFQGRATLTADTSASTAYMELSSLRSEDTAVYFCARTGGLRRAYFTYWGQGTLVTVSSGGSSGQVQLVESGGGVVQPGRSLRLSCAASGFTFTKAWMHWVRQAPGKQLEWVAQIKDKSNSYATYYADSVKGRFTISRDDSKNTLYLQMNSLRAEDTAVYYCRGVYYALSPFDYWGQGTLVTVSSASGGSGDKTHTCPPCPAPE

SEQ ID NO: 186 - protein, 1229 aa, synthetic construct
  REGION 1..1229: note = Artificial Sequence
DIQMTQSPSSLSASVGDRVTITCQASQNIYVWLNWYQQKPGKAPKLLIYKASNLHTGVPSRFSGSGSGTDFTLTISSLQPEDIATYYCQQGQTYPYTFGQGTKLEIKGGSSGDIVMTQTPLSLSVTPGQPASISCKSSQSLVHNNANTYLSWYLQKPGQSPQSLIYKVSNRFSGVPDRFSGSGSGTDFTLKISRVEAEDVGVYYCGQGTQYPFTFGSGTKVEIKGGSSGDIVLTQSPATLSLSPGERATISCRASQSVSSYGQGFMHWYQQKPGQPPRLLIYGASSRATGIPARFSGSGSGTDFTLTISPLEPEDFAVYYCQQNKEDPWTFGGGTKLEIKGGGGSGGSGSGGGGSASGSGQVQLVQSGAEVVKPGASVKVSCKASGYTFTSYAMHWVKEAPGQGLEWIGYIYPGQGGTNYNQKFQGRATLTADTSASTAYMELSSLRSEDTAVYFCARTGGLRRAYFTYWGQGTLVTVSSGGSSGQVQLVESGGGVVQPGRSLRLSCAASGFTFTKAWMHWVRQAPGKQLEWVAQIKDKSNSYATYYADSVKGRFTISRDDSKNTLYLQMNSLRAEDTAVYYCRGVYYALSPFDYWGQGTLVTVSSGGSSGQVQLVQSGAEVVKPGASVKVSCKASGYTFTSYYIHWVRQAPGQGLEWIGSIYPGNVNTNYAQKFQGRATLTVDTSISTAYMELSRLRSDDTAVYYCTRSHYGLDWNFDVWGKGTTVTVSSASGGSGDKTHTCPPCPAPEAAGGPSVFLFPPKPKDTLMISRTPEVTCVVVDVSHEDPEVKFNWYVDGVEVHNAKTKPREEQYNSTYRVVSVLTVLHQDWLNGKEYKCKVSNKALAAPIEKTISKAKGQPREPQVYTLPPSRDELTKNQVSLTCLVKGFYPSDIAVEWESNGQPENNYKTTPPVLDSDGSFFLYSKLTVDKSRWQQGNVFSCSVMHEALHNHYTQKSLSLSPGGGGGSGSGGSGGGSSGGGGSGGGGSGGGGSGGGGSGGGGSDKTHTCPPCPAPEAAGGPSVFLFPPKPKDTLMISRTPEVTCVVVDVSHEDPEVKFNWYVDGVEVHNAKTKPREEQYNSTYRVVSVLTVLHQDWLNGKEYKCKVSNKALAAPIEKTISKAKGQPREPQVYTLPPSRDELTKNQVSLTCLVKGFYPSDIAVEWESNGQPENNYKTTPPVLDSDGSFFLYSKLTVDKSRWQQGNVFSCSVMHEALHNHYTQKSLSLSPG

SEQ ID NO: 187 - protein, 1228 aa, synthetic construct
  REGION 1..1228: note = Artificial Sequence
DIQMTQSPSSLSASVGDRVTITCQASQNIYVWLNWYQQKPGKAPKLLIYKASNLHTGVPSRFSGSGSGTDFTLTISSLQPEDIATYYCQQGQTYPYTFGQGTKLEIKGGSSGDIVMTQTPLSLSVTPGQPASISCKSSQSLVHNNANTYLSWYLQKPGQSPQSLIYKVSNRFSGVPDRFSGSGSGTDFTLKISRVEAEDVGVYYCGQGTQYPFTFGSGTKVEIKGGSSGDIVLTQSPATLSLSPGERATISCRASQSVSSYGQGFMHWYQQKPGQPPRLLIYGASSRATGIPARFSGSGSGTDFTLTISPLEPEDFAVYYCQQNKEDPWTFGGGTKLEIKGGGGSGGSGSGGGGSASGSGQVQLVQSGAEVVKPGASVKVSCKASGYTFTSYAMHWVKEAPGQGLEWIGYIYPGQGGTNYNQKFQGRATLTADTSASTAYMELSSLRSEDTAVYFCARTGGLRRAYFTYWGQGTLVTVSSGGSSGQVQLVESGGGVVQPGRSLRLSCAASGFTFTKAWMHWVRQAPGKQLEWVAQIKDKSNSYATYYADSVKGRFTISRDDSKNTLYLQMNSLRAEDTAVYYCRGVYYALSPFDYWGQGTLVTVSSGGSSGQVQLVQSGAEVVKPGASVKVSCKASGYTFTSYYIHWVRQAPGQGLEWIGSIYPGNVNTNYAQKFQGRATLTVDTSISTAYMELSRLRSDDTAVYYCTRSHYGLDWNFDVWGKGTTVTVSSASGGSGDKTHTCPPCPAPEAAGGPSVFLFPPKPKDTLMISRTPEVTCVVVDVSHEDPEVKFNWYVDGVEVHNAKTKPREEQYNSTYRVVSVLTVLHQDWLNGKEYKCKVSNKALAAPIEKTISKAKGQPREPQVYTLPPSRDELTKNQVSLTCLVKGFYPSDIAVEWESNGQPENNYKTTPPVLDSDGSFFLYSKLTVDKSRWQQGNVFSCSVMHEALHNHYTQKSLSLSPGGGGGSGSGGSGGGSSGGGGSGGGGSGGGGSGGGGSGGGGSSSSTCPPCPAPEAAGGPSVFLFPPKPKDTLMISRTPEVTCVVVDVSHEDPEVKFNWYVDGVEVHNAKTKPREEQYNSTYRVVSVLTVLHQDWLNGKEYKCKVSNKALAAPIEKTISKAKGQPREPQVYTLPPSRDELTKNQVSLTCLVKGFYPSDIAVEWESNGQPENNYKTTPPVLDSDGSFFLYSKLTVDKSRWQQGNVFSCSVMHEALHNHYTQKSLSLSPG

SEQ ID NO: 188 - protein, 1230 aa, synthetic construct
  REGION 1..1230: note = Artificial Sequence
DIQMTQSPSSLSASVGDRVTITCQASQNIYVWLNWYQQKPGKAPKLLIYKASNLHTGVPSRFSGSGSGTDFTLTISSLQPEDIATYYCQQGQTYPYTFGQGTKLEIKGGSSGDIVMTQTPLSLSVTPGQPASISCKSSQSLVHNNANTYLSWYLQKPGQSPQSLIYKVSNRFSGVPDRFSGSGSGTDFTLKISRVEAEDVGVYYCGQGTQYPFTFGSGTKVEIKGGSSGDIVLTQSPATLSLSPGERATISCRASQSVSSYGQGFMHWYQQKPGQPPRLLIYGASSRATGIPARFSGSGSGTDFTLTISPLEPEDFAVYYCQQNKEDPWTFGGGTKLEIKGGGGSGGSGSGGGGSASGSGQVQLVQSGAEVVKPGASVKVSCKASGYTFTSYAMHWVKEAPGQGLEWIGYIYPGQGGTNYNQKFQGRATLTADTSASTAYMELSSLRSEDTAVYFCARTGGLRRAYFTYWGQGTLVTVSSGGSSGQVQLVESGGGVVQPGRSLRLSCAASGFTFTKAWMHWVRQAPGKQLEWVAQIKDKSNSYATYYADSVKGRFTISRDDSKNTLYLQMNSLRAEDTAVYYCRGVYYALSPFDYWGQGTLVTVSSGGSSGQVQLVQSGAEVVKPGASVKVSCKASGYTFTSYYIHWVRQAPGQGLEWIGSIYPGNVNTNYAQKFQGRATLTVDTSISTAYMELSRLRSDDTAVYYCTRSHYGLDWNFDVWGKGTTVTVSSASGGSGDKTHTCPPCPAPEAAGGPSVFLFPPKPKDTLMISRTPEVTCVVVDVSHEDPEVKFNWYVDGVEVHNAKTKPREEQYNSTYRVVSVLTVLHQDWLNGKEYKCKVSNKALAAPIEKTISKAKGQPREPQVYTLPPSRDELTKNQVSLTCLVKGFYPSDIAVEWESNGQPENNYKTTPPVLDSDGSFFLYSKLTVDKSRWQQGNVFSCSVMHEALHNHYTQKSLSLSPGGGGGSGSGGSGGGSSGGGGSGGGGSGGGGSGGGGSGGGGSSSSGSTCPPCPAPEAAGGPSVFLFPPKPKDTLMISRTPEVTCVVVDVSHEDPEVKFNWYVDGVEVHNAKTKPREEQYNSTYRVVSVLTVLHQDWLNGKEYKCKVSNKALAAPIEKTISKAKGQPREPQVYTLPPSRDELTKNQVSLTCLVKGFYPSDIAVEWESNGQPENNYKTTPPVLDSDGSFFLYSKLTVDKSRWQQGNVFSCSVMHEALHNHYTQKSLSLSPG

SEQ ID NO: 189 - protein, 969 aa, synthetic construct
  REGION 1..969: note = Artificial Sequence
DIQMTQSPSSLSASVGDRVTITCQASQNIYVWLNWYQQKPGKAPKLLIYKASNLHTGVPSRFSGSGSGTDFTLTISSLQPEDIATYYCQQGQTYPYTFGQGTKLEIKGGSSGDIVMTQTPLSLSVTPGQPASISCKSSQSLVHNNANTYLSWYLQKPGQSPQSLIYKVSNRFSGVPDRFSGSGSGTDFTLKISRVEAEDVGVYYCGQGTQYPFTFGSGTKVEIKGGSSGDIVLTQSPATLSLSPGERATISCRASQSVSSYGQGFMHWYQQKPGQPPRLLIYGASSRATGIPARFSGSGSGTDFTLTISPLEPEDFAVYYCQQNKEDPWTFGGGTKLEIKGGGGSGGSGSGGGGSASGSGQVQLVQSGAEVVKPGASVKVSCKASGYTFTSYAMHWVKEAPGQGLEWIGYIYPGQGGTNYNQKFQGRATLTADTSASTAYMELSSLRSEDTAVYFCARTGGLRRAYFTYWGQGTLVTVSSGGSSGQVQLVESGGGVVQPGRSLRLSCAASGFTFTKAWMHWVRQAPGKQLEWVAQIKDKSNSYATYYADSVKGRFTISRDDSKNTLYLQMNSLRAEDTAVYYCRGVYYALSPFDYWGQGTLVTVSSGGSSGQVQLVQSGAEVVKPGASVKVSCKASGYTFTSYYIHWVRQAPGQGLEWIGSIYPGNVNTNYAQKFQGRATLTVDTSISTAYMELSRLRSDDTAVYYCTRSHYGLDWNFDVWGKGTTVTVSSASGGSGGQPREPQVYTLPPSRDELTKNQVSLTCLVKGFYPSDIAVEWESNGQPENNYKTTPPVLDSDGSFFLYSKLTVDKSRWQQGNVFSCSVMHEALHNHYTQKSLSLSPGGGGSSGGGGSGGSGSGGSGSGQPREPQVYTLPPSRDELTKNQVSLTCLVKGFYPSDIAVEWESNGQPENNYKTTPPVLDSDGSFFLYSKLTVDKSRWQQGNVFSCSVMHEALHNHYTQKSLSLSPG

SEQ ID NO: 190 - protein, 971 aa, synthetic construct
  REGION 1..971: note = Artificial Sequence
DIQMTQSPSSLSASVGDRVTITCQASQNIYVWLNWYQQKPGKAPKLLIYKASNLHTGVPSRFSGSGSGTDFTLTISSLQPEDIATYYCQQGQTYPYTFGQGTKLEIKGGSSGDIVMTQTPLSLSVTPGQPASISCKSSQSLVHNNANTYLSWYLQKPGQSPQSLIYKVSNRFSGVPDRFSGSGSGTDFTLKISRVEAEDVGVYYCGQGTQYPFTFGSGTKVEIKGGSSGDIVLTQSPATLSLSPGERATISCRASQSVSSYGQGFMHWYQQKPGQPPRLLIYGASSRATGIPARFSGSGSGTDFTLTISPLEPEDFAVYYCQQNKEDPWTFGGGTKLEIKGGGGSGGSGSGGGGSASGSGQVQLVQSGAEVVKPGASVKVSCKASGYTFTSYAMHWVKEAPGQGLEWIGYIYPGQGGTNYNQKFQGRATLTADTSASTAYMELSSLRSEDTAVYFCARTGGLRRAYFTYWGQGTLVTVSSGGSSGQVQLVESGGGVVQPGRSLRLSCAASGFTFTKAWMHWVRQAPGKQLEWVAQIKDKSNSYATYYADSVKGRFTISRDDSKNTLYLQMNSLRAEDTAVYYCRGVYYALSPFDYWGQGTLVTVSSGGSSGQVQLVQSGAEVVKPGASVKVSCKASGYTFTSYYIHWVRQAPGQGLEWIGSIYPGNVNTNYAQKFQGRATLTVDTSISTAYMELSRLRSDDTAVYYCTRSHYGLDWNFDVWGKGTTVTVSSASGGSGGQPREPQVYTLPPSRDELTKNQVSLTCLVKGFYPSDIAVEWESNGQPENNYKTTPPVLDSDGSFFLYSKLTVDKSRWQQGNVFSCSVMHEALHNHYTQKSLSLSPGGSGSSGGGGSGGSGSGGSGSSGGQPREPQVYTLPPSRDELTKNQVSLTCLVKGFYPSDIAVEWESNGQPENNYKTTPPVLDSDGSFFLYSKLTVDKSRWQQGNVFSCSVMHEALHNHYTQKSLSLSPG

SEQ ID NO: 191 - protein, 969 aa, synthetic construct
  REGION 1..969: note = Artificial Sequence
DIQMTQSPSSLSASVGDRVTITCQASQNIYVWLNWYQQKPGKAPKLLIYKASNLHTGVPSRFSGSGSGTDFTLTISSLQPEDIATYYCQQGQTYPYTFGQGTKLEIKGGSSGDIVMTQTPLSLSVTPGQPASISCKSSQSLVHNNANTYLSWYLQKPGQSPQSLIYKVSNRFSGVPDRFSGSGSGTDFTLKISRVEAEDVGVYYCGQGTQYPFTFGSGTKVEIKGGSSGDIVLTQSPATLSLSPGERATISCRASQSVSSYGQGFMHWYQQKPGQPPRLLIYGASSRATGIPARFSGSGSGTDFTLTISPLEPEDFAVYYCQQNKEDPWTFGGGTKLEIKGGGGSGGSGSGGGGSASGSGQVQLVQSGAEVVKPGASVKVSCKASGYTFTSYAMHWVKEAPGQGLEWIGYIYPGQGGTNYNQKFQGRATLTADTSASTAYMELSSLRSEDTAVYFCARTGGLRRAYFTYWGQGTLVTVSSGGSSGQVQLVESGGGVVQPGRSLRLSCAASGFTFTKAWMHWVRQAPGKQLEWVAQIKDKSNSYATYYADSVKGRFTISRDDSKNTLYLQMNSLRAEDTAVYYCRGVYYALSPFDYWGQGTLVTVSSGGSSGQVQLVQSGAEVVKPGASVKVSCKASGYTFTSYYIHWVRQAPGQGLEWIGSIYPGNVNTNYAQKFQGRATLTVDTSISTAYMELSRLRSDDTAVYYCTRSHYGLDWNFDVWGKGTTVTVSSASGGSGGQPREPQVCTLPPSRDELTKNQVSLTCLVKGFYPSDIAVEWESNGQPENNYKTTPPVLDSDGSFFLYSKLTVDKSRWQQGNVFSCSVMHEALHNHYTQKSLSLSPGGGGSSGGSGSGGSGSGGSGSGQPREPQVYTLPPCRDELTKNQVSLTCLVKGFYPSDIAVEWESNGQPENNYKTTPPVLDSDGSFFLYSKLTVDKSRWQQGNVFSCSVMHEALHNHYTQKSLSLSPG

SEQ ID NO: 192 - protein, 971 aa, synthetic construct
  REGION 1..971: note = Artificial Sequence
DIQMTQSPSSLSASVGDRVTITCQASQNIYVWLNWYQQKPGKAPKLLIYKASNLHTGVPSRFSGSGSGTDFTLTISSLQPEDIATYYCQQGQTYPYTFGQGTKLEIKGGSSGDIVMTQTPLSLSVTPGQPASISCKSSQSLVHNNANTYLSWYLQKPGQSPQSLIYKVSNRFSGVPDRFSGSGSGTDFTLKISRVEAEDVGVYYCGQGTQYPFTFGSGTKVEIKGGSSGDIVLTQSPATLSLSPGERATISCRASQSVSSYGQGFMHWYQQKPGQPPRLLIYGASSRATGIPARFSGSGSGTDFTLTISPLEPEDFAVYYCQQNKEDPWTFGGGTKLEIKGGGGSGGSGSGGGGSASGSGQVQLVQSGAEVVKPGASVKVSCKASGYTFTSYAMHWVKEAPGQGLEWIGYIYPGQGGTNYNQKFQGRATLTADTSASTAYMELSSLRSEDTAVYFCARTGGLRRAYFTYWGQGTLVTVSSGGSSGQVQLVESGGGVVQPGRSLRLSCAASGFTFTKAWMHWVRQAPGKQLEWVAQIKDKSNSYATYYADSVKGRFTISRDDSKNTLYLQMNSLRAEDTAVYYCRGVYYALSPFDYWGQGTLVTVSSGGSSGQVQLVQSGAEVVKPGASVKVSCKASGYTFTSYYIHWVRQAPGQGLEWIGSIYPGNVNTNYAQKFQGRATLTVDTSISTAYMELSRLRSDDTAVYYCTRSHYGLDWNFDVWGKGTTVTVSSASGGSGGQPREPQVCTLPPSRDELTKNQVSLTCLVKGFYPSDIAVEWESNGQPENNYKTTPPVLDSDGSFFLYSKLTVDKSRWQQGNVFSCSVMHEALHNHYTQKSLSLSPGSGGSSGGSGSGGSGSGGSGSSGGQPREPQVYTLPPCRDELTKNQVSLTCLVKGFYPSDIAVEWESNGQPENNYKTTPPVLDSDGSFFLYSKLTVDKSRWQQGNVFSCSVMHEALHNHYTQKSLSLSPG

SEQ ID NO: 193 - protein, 1005 aa, synthetic construct
  REGION 1..1005: note = Artificial Sequence
DIQMTQSPSSLSASVGDRVTITCQASQNIYVWLNWYQQKPGKAPKLLIYKASNLHTGVPSRFSGSGSGTDFTLTISSLQPEDIATYYCQQGQTYPYTFGQGTKLEIKGGSSGDIVMTQTPLSLSVTPGQPASISCKSSQSLVHNNANTYLSWYLQKPGQSPQSLIYKVSNRFSGVPDRFSGSGSGTDFTLKISRVEAEDVGVYYCGQGTQYPFTFGSGTKVEIKGGSSGDIVLTQSPATLSLSPGERATISCRASQSVSSYGQGFMHWYQQKPGQPPRLLIYGASSRATGIPARFSGSGSGTDFTLTISPLEPEDFAVYYCQQNKEDPWTFGGGTKLEIKGGGGSGGSGSGGGGSASGSGQVQLVQSGAEVVKPGASVKVSCKASGYTFTSYAMHWVKEAPGQGLEWIGYIYPGQGGTNYNQKFQGRATLTADTSASTAYMELSSLRSEDTAVYFCARTGGLRRAYFTYWGQGTLVTVSSGGSSGQVQLVESGGGVVQPGRSLRLSCAASGFTFTKAWMHWVRQAPGKQLEWVAQIKDKSNSYATYYADSVKGRFTISRDDSKNTLYLQMNSLRAEDTAVYYCRGVYYALSPFDYWGQGTLVTVSSGGSSGQVQLVQSGAEVVKPGASVKVSCKASGYTFTSYYIHWVRQAPGQGLEWIGSIYPGNVNTNYAQKFQGRATLTVDTSISTAYMELSRLRSDDTAVYYCTRSHYGLDWNFDVWGKGTTVTVSSASGGSGSSGCPPCPAPEAAGGPSGQPREPQVYTLPPSRDELTKNQVSLTCLVKGFYPSDIAVEWESNGQPENNYKTTPPVLDSDGSFFLYSKLTVDKSRWQQGNVFSCSVMHEALHNHYTQKSLSLSPGGSGSSGGGGSGGSGSGGSGSSGSSGCPPCPAPEAAGGPSGQPREPQVYTLPPSRDELTKNQVSLTCLVKGFYPSDIAVEWESNGQPENNYKTTPPVLDSDGSFFLYSKLTVDKSRWQQGNVFSCSVMHEALHNHYTQKSLSLSPG

SEQ ID NO: 194 - protein, 1001 aa, synthetic construct
  REGION 1..1001: note = Artificial Sequence
DIQMTQSPSSLSASVGDRVTITCQASQNIYVWLNWYQQKPGKAPKLLIYKASNLHTGVPSRFSGSGSGTDFTLTISSLQPEDIATYYCQQGQTYPYTFGQGTKLEIKGGSSGDIVMTQTPLSLSVTPGQPASISCKSSQSLVHNNANTYLSWYLQKPGQSPQSLIYKVSNRFSGVPDRFSGSGSGTDFTLKISRVEAEDVGVYYCGQGTQYPFTFGSGTKVEIKGGSSGDIVLTQSPATLSLSPGERATISCRASQSVSSYGQGFMHWYQQKPGQPPRLLIYGASSRATGIPARFSGSGSGTDFTLTISPLEPEDFAVYYCQQNKEDPWTFGGGTKLEIKGGGGSGGSGSGGGGSASGSGQVQLVQSGAEVVKPGASVKVSCKASGYTFTSYAMHWVKEAPGQGLEWIGYIYPGQGGTNYNQKFQGRATLTADTSASTAYMELSSLRSEDTAVYFCARTGGLRRAYFTYWGQGTLVTVSSGGSSGQVQLVESGGGVVQPGRSLRLSCAASGFTFTKAWMHWVRQAPGKQLEWVAQIKDKSNSYATYYADSVKGRFTISRDDSKNTLYLQMNSLRAEDTAVYYCRGVYYALSPFDYWGQGTLVTVSSGGSSGQVQLVQSGAEVVKPGASVKVSCKASGYTFTSYYIHWVRQAPGQGLEWIGSIYPGNVNTNYAQKFQGRATLTVDTSISTAYMELSRLRSDDTAVYYCTRSHYGLDWNFDVWGKGTTVTVSSASGGSGSCPPCPAPEAAGGSSGQPREPQVYTLPPSRDELTKNQVSLTCLVKGFYPSDIAVEWESNGQPENNYKTTPPVLDSDGSFFLYSKLTVDKSRWQQGNVFSCSVMHEALHNHYTQKSLSLSPGGSGSSGGGGSGGSGSGGSGSSGSCPPCPAPEAAGGSSGQPREPQVYTLPPSRDELTKNQVSLTCLVKGFYPSDIAVEWESNGQPENNYKTTPPVLDSDGSFFLYSKLTVDKSRWQQGNVFSCSVMHEALHNHYTQKSLSLSPG

SEQ ID NO: 195 - protein, 963 aa, synthetic construct
  REGION 1..963: note = Artificial Sequence
DIQMTQSPSSLSASVGDRVTITCQASQNIYVWLNWYQQKPGKAPKLLIYKASNLHTGVPSRFSGSGSGTDFTLTISSLQPEDIATYYCQQGQTYPYTFGQGTKLEIKGGSSGDIVMTQTPLSLSVTPGQPASISCKSSQSLVHNNANTYLSWYLQKPGQSPQSLIYKVSNRFSGVPDRFSGSGSGTDFTLKISRVEAEDVGVYYCGQGTQYPFTFGSGTKVEIKGGSSGDIVLTQSPATLSLSPGERATISCRASQSVSSYGQGFMHWYQQKPGQPPRLLIYGASSRATGIPARFSGSGSGTDFTLTISPLEPEDFAVYYCQQNKEDPWTFGGGTKLEIKGGGGSGGSGSGGGGSASGSGQVQLVQSGAEVVKPGASVKVSCKASGYTFTSYAMHWVKEAPGQGLEWIGYIYPGQGGTNYNQKFQGRATLTADTSASTAYMELSSLRSEDTAVYFCARTGGLRRAYFTYWGQGTLVTVSSGGSSGQVQLVESGGGVVQPGRSLRLSCAASGFTFTKAWMHWVRQAPGKQLEWVAQIKDKSNSYATYYADSVKGRFTISRDDSKNTLYLQMNSLRAEDTAVYYCRGVYYALSPFDYWGQGTLVTVSSGGSSGQVQLVQSGAEVVKPGASVKVSCKASGYTFTSYYIHWVRQAPGQGLEWIGSIYPGNVNTNYAQKFQGRATLTVDTSISTAYMELSRLRSDDTAVYYCTRSHYGLDWNFDVWGKGTTVTVSSASGGSGDKTHTCPPCPAPEAAGGPSVFLFPPKPKDTLMISRTPEVTCVVVDVSHEDPEVKFNWYVDGVEVHNAKTKPREEQYNSTYRVVSVLTVLHQDWLNGKEYKCKVSNKALAAPIEKTISKAKGQPREPQVCTLPPSRDELTKNQVSLSCAVKGFYPSDIAVEWESNGQPENNYKTTPPVLDSDGSFFLVSKLTVDKSRWQQGNVFSCSVMHEALHNHYTQKSLSLSPG

SEQ ID NO: 196 - protein, 725 aa, synthetic construct
  REGION 1..725: note = Artificial Sequence
DIQLTQSPASLAVSLGQRATISCKASQSVDYDGDSYLNWYQQIPGQPPKLLIYDASNLVSGIPPRFSGSGSGTDFTLNIHPVEKVDAATYHCQQSTEDPWTFGGGTKLEIKGGSSGDIVLTQSPAILSASPGEKVTMTCRASSSVNYMDWYQKKPGSSPKPWIYATSNLASGVPARFSGSGSGTSYSLTISRVEAEDAATYYCQQWSFNPPTFGGGTKLEIKGGGGSGGSGSGGGGSASGSGEVQLQQSGAELVKPGASVKMSCKASGYTFTSYNMHWVKQTPGQGLEWIGAIYPGNGDTSYNQKFKGKATLTADKSSSTAYMQLSSLTSEDSADYYCARSNYYGSSYWFFDVWGAGTTVTVSSGGSSGQVQLQQSGAELVRPGSSVKISCKASGYAFSSYWMNWVKQRPGQGLEWIGQIWPGDGDTNYNGKFKGKATLTADESSSTAYMQLSSLASEDSAVYFCARRETTTVGRYYYAMDYWGQGTTVTVSSASGGSGDKTHTCPPCPAPEAAGGPSVFLFPPKPKDTLMISRTPEVTCVVVDVSHEDPEVKFNWYVDGVEVHNAKTKPREEQYNSTYRVVSVLTVLHQDWLNGKEYKCKVSNKALAAPIEKTISKAKGQPREPQVYTLPPCRDELTKNQVSLWCLVKGFYPSDIAVEWESNGQPENNYKTTPPVLDSDGSFFLYSKLTVDKSRWQQGNVFSCSVMHEALHNHYTQKSLSLSPG

SEQ ID NO: 197 - protein, 725 aa, synthetic construct
  REGION 1..725: note = Artificial Sequence
DIVLTQSPAILSASPGEKVTMTCRASSSVNYMDWYQKKPGSSPKPWIYATSNLASGVPARFSGSGSGTSYSLTISRVEAEDAATYYCQQWSFNPPTFGGGTKLEIKGGSSGDIQLTQSPASLAVSLGQRATISCKASQSVDYDGDSYLNWYQQIPGQPPKLLIYDASNLVSGIPPRFSGSGSGTDFTLNIHPVEKVDAATYHCQQSTEDPWTFGGGTKLEIKGGGGSGGSGSGGGGSASGSGQVQLQQSGAELVRPGSSVKISCKASGYAFSSYWMNWVKQRPGQGLEWIGQIWPGDGDTNYNGKFKGKATLTADESSSTAYMQLSSLASEDSAVYFCARRETTTVGRYYYAMDYWGQGTTVTVSSGGSSGEVQLQQSGAELVKPGASVKMSCKASGYTFTSYNMHWVKQTPGQGLEWIGAIYPGNGDTSYNQKFKGKATLTADKSSSTAYMQLSSLTSEDSADYYCARSNYYGSSYWFFDVWGAGTTVTVSSASGGSGDKTHTCPPCPAPEAAGGPSVFLFPPKPKDTLMISRTPEVTCVVVDVSHEDPEVKFNWYVDGVEVHNAKTKPREEQYNSTYRVVSVLTVLHQDWLNGKEYKCKVSNKALAAPIEKTISKAKGQPREPQVYTLPPCRDELTKNQVSLWCLVKGFYPSDIAVEWESNGQPENNYKTTPPVLDSDGSFFLYSKLTVDKSRWQQGNVFSCSVMHEALHNHYTQKSLSLSPG

SEQ ID NO: 198 - protein, 720 aa, synthetic construct
  REGION 1..720: note = Artificial Sequence
SDISVAPGETARISCGEKSLGSRAVQWYQHRAGQAPSLIIYNNQDRPSGIPERFSGSPDSPFGTTATLTITSVEAGDEADYYCHIWDSRVPTKWVFGGGTTLTVLGGSSGLTQSPGTLSLSPGETAIISCRTSQYGSLAWYQQRPGQAPRLVIYSGSTRAAGIPDRFSGSRWGPDYNLTISNLESGDFGVYYCQQYEFFGQGTKVQVDIKGGGGSGGSGSGGGGSASGSGQVQLVQSGGQMKKPGESMRISCRASGYEFIDCTLNWIRLAPGKRPEWMGWLKPRGGAVNYARPLQGRVTMTRDVYSDTAFLELRSLTVDDTAVYFCTRGKNCDYNWDFEHWGRGTPVIVSSGGSSGQMQLQESGPGLVKPSETLSLTCSVSGASISDSYWSWIRRSPGKGLEWIGYVHKSGDTNYSPSLKSRVNLSLDTSKNQVSLSLVAATAADSGKYYCARTLHGRRIYGIVAFNEWFTYFYMDVWGNGTQVTVSSASGGSGDKTHTCPPCPAPELLGGPSVFLFPPKPKDTLMISRTPEVTCVVVDVSHEDPEVKFNWYVDGVEVHNAKTKPREEQYNSTYRVVSVLTVLHQDWLNGKEYKCKVSNKALPAPIEKTISKAKGQPREPQVCTLPPSRDELTKNQVSLSCAVKGFYPSDIAVEWESNGQPENNYKTTPPVLDSDGSFFLVSKLTVDKSRWQQGNVFSCSVMHEALHNHYTQKSLSLSPG

SEQ ID NO: 199 - protein, 720 aa, synthetic construct
  REGION 1..720: note = Artificial Sequence
LTQSPGTLSLSPGETAIISCRTSQYGSLAWYQQRPGQAPRLVIYSGSTRAAGIPDRFSGSRWGPDYNLTISNLESGDFGVYYCQQYEFFGQGTKVQVDIKGGSSGSDISVAPGETARISCGEKSLGSRAVQWYQHRAGQAPSLIIYNNQDRPSGIPERFSGSPDSPFGTTATLTITSVEAGDEADYYCHIWDSRVPTKWVFGGGTTLTVLGGGGSGGSGSGGGGSASGSGQMQLQESGPGLVKPSETLSLTCSVSGASISDSYWSWIRRSPGKGLEWIGYVHKSGDTNYSPSLKSRVNLSLDTSKNQVSLSLVAATAADSGKYYCARTLHGRRIYGIVAFNEWFTYFYMDVWGNGTQVTVSSGGSSGQVQLVQSGGQMKKPGESMRISCRASGYEFIDCTLNWIRLAPGKRPEWMGWLKPRGGAVNYARPLQGRVTMTRDVYSDTAFLELRSLTVDDTAVYFCTRGKNCDYNWDFEHWGRGTPVIVSSASGGSGDKTHTCPPCPAPELLGGPSVFLFPPKPKDTLMISRTPEVTCVVVDVSHEDPEVKFNWYVDGVEVHNAKTKPREEQYNSTYRVVSVLTVLHQDWLNGKEYKCKVSNKALPAPIEKTISKAKGQPREPQVCTLPPSRDELTKNQVSLSCAVKGFYPSDIAVEWESNGQPENNYKTTPPVLDSDGSFFLVSKLTVDKSRWQQGNVFSCSVMHEALHNHYTQKSLSLSPG

SEQ ID NO: 200 - protein, 748 aa, synthetic construct
  REGION 1..748: note = Artificial Sequence
SELTQDPAVSVALKQTVTITCRGDSLRSHYASWYQKKPGQAPVLLFYGKNNRPSGIPDRFSGSASGNRASLTITGAQAEDEADYYCSSRDKSGSRLSVFGGGTKLTVLGGSSGQSALTQPASVSGSPGQTITISCNGTSSDVGGFDSVSWYQQSPGKAPKVMVFDVSHRPSGISNRFSGSKSGNTASLTISGLHIEDEGDYFCSSLTDRSHRIFGGGTKVTVLGGGGSGGSGSGGGGSASGSGQEQLVESGGGVVQPGGSLRLSCLASGFTFHKYGMHWVRQAPGKGLEWVALISDDGMRKYHSDSMWGRVTISRDNSKNTLYLQFSSLKVEDTAMFFCAREAGGPIWHDDVKYYDFNDGYYNYHYMDVWGKGTTVTVSSGGSSGEVRLVESGGGLVKPGGSLRLSCSASGFDFDNAWMTWVRQPPGKGLEWVGRITGPGEGWSVDYAESVKGRFTISRDNTKNTLYLEMNNVRTEDTGYYFCARTGKYYDFWSGYPPGEEYFQDWGQGTLVIVSSASGGSGDKTHTCPPCPAPELLGGPSVFLFPPKPKDTLMISRTPEVTCVVVDVSHEDPEVKFNWYVDGVEVHNAKTKPREEQYNSTYRVVSVLTVLHQDWLNGKEYKCKVSNKALPAPIEKTISKAKGQPREPQVYTLPPCRDELTKNQVSLWCLVKGFYPSDIAVEWESNGQPENNYKTTPPVLDSDGSFFLYSKLTVDKSRWQQGNVFSCSVMHEALHNHYTQKSLSLSPG

SEQ ID NO: 201 - protein, 748 aa, synthetic construct
  REGION 1..748: note = Artificial Sequence
QSALTQPASVSGSPGQTITISCNGTSSDVGGFDSVSWYQQSPGKAPKVMVFDVSHRPSGISNRFSGSKSGNTASLTISGLHIEDEGDYFCSSLTDRSHRIFGGGTKVTVLGGSSGSELTQDPAVSVALKQTVTITCRGDSLRSHYASWYQKKPGQAPVLLFYGKNNRPSGIPDRFSGSASGNRASLTITGAQAEDEADYYCSSRDKSGSRLSVFGGGTKLTVLGGGGSGGSGSGGGGSASGSGEVRLVESGGGLVKPGGSLRLSCSASGFDFDNAWMTWVRQPPGKGLEWVGRITGPGEGWSVDYAESVKGRFTISRDNTKNTLYLEMNNVRTEDTGYYFCARTGKYYDFWSGYPPGEEYFQDWGQGTLVIVSSGGSSGQEQLVESGGGVVQPGGSLRLSCLASGFTFHKYGMHWVRQAPGKGLEWVALISDDGMRKYHSDSMWGRVTISRDNSKNTLYLQFSSLKVEDTAMFFCAREAGGPIWHDDVKYYDFNDGYYNYHYMDVWGKGTTVTVSSASGGSGDKTHTCPPCPAPELLGGPSVFLFPPKPKDTLMISRTPEVTCVVVDVSHEDPEVKFNWYVDGVEVHNAKTKPREEQYNSTYRVVSVLTVLHQDWLNGKEYKCKVSNKALPAPIEKTISKAKGQPREPQVYTLPPCRDELTKNQVSLWCLVKGFYPSDIAVEWESNGQPENNYKTTPPVLDSDGSFFLYSKLTVDKSRWQQGNVFSCSVMHEALHNHYTQKSLSLSPG

SEQ ID NO: 202 - protein, 738 aa, synthetic construct
  REGION 1..738: note = Artificial Sequence
SDISVAPGETARISCGEKSLGSRAVQWYQHRAGQAPSLIIYNNQDRPSGIPERFSGSPDSPFGTTATLTITSVEAGDEADYYCHIWDSRVPTKWVFGGGTTLTVLGGSSGSELTQDPAVSVALKQTVTITCRGDSLRSHYASWYQKKPGQAPVLLFYGKNNRPSGIPDRFSGSASGNRASLTITGAQAEDEADYYCSSRDKSGSRLSVFGGGTKLTVLGGGGSGGSGSGGGGSASGSGEVRLVESGGGLVKPGGSLRLSCSASGFDFDNAWMTWVRQPPGKGLEWVGRITGPGEGWSVDYAESVKGRFTISRDNTKNTLYLEMNNVRTEDTGYYFCARTGKYYDFWSGYPPGEEYFQDWGQGTLVIVSSGGSSGQMQLQESGPGLVKPSETLSLTCSVSGASISDSYWSWIRRSPGKGLEWIGYVHKSGDTNYSPSLKSRVNLSLDTSKNQVSLSLVAATAADSGKYYCARTLHGRRIYGIVAFNEWFTYFYMDVWGNGTQVTVSSASGGSGDKTHTCPPCPAPELLGGPSVFLFPPKPKDTLMISRTPEVTCVVVDVSHEDPEVKFNWYVDGVEVHNAKTKPREEQYNSTYRVVSVLTVLHQDWLNGKEYKCKVSNKALPAPIEKTISKAKGQPREPQVCTLPPSRDELTKNQVSLSCAVKGFYPSDIAVEWESNGQPENNYKTTPPVLDSDGSFFLVSKLTVDKSRWQQGNVFSCSVMHEALHNHYTQKSLSLSPG

SEQ ID NO: 203 - protein, 738 aa, synthetic construct
  REGION 1..738: note = Artificial Sequence
SELTQDPAVSVALKQTVTITCRGDSLRSHYASWYQKKPGQAPVLLFYGKNNRPSGIPDRFSGSASGNRASLTITGAQAEDEADYYCSSRDKSGSRLSVFGGGTKLTVLGGSSGSDISVAPGETARISCGEKSLGSRAVQWYQHRAGQAPSLIIYNNQDRPSGIPERFSGSPDSPFGTTATLTITSVEAGDEADYYCHIWDSRVPTKWVFGGGTTLTVLGGGGSGGSGSGGGGSASGSGQMQLQESGPGLVKPSETLSLTCSVSGASISDSYWSWIRRSPGKGLEWIGYVHKSGDTNYSPSLKSRVNLSLDTSKNQVSLSLVAATAADSGKYYCARTLHGRRIYGIVAFNEWFTYFYMDVWGNGTQVTVSSGGSSGEVRLVESGGGLVKPGGSLRLSCSASGFDFDNAWMTWVRQPPGKGLEWVGRITGPGEGWSVDYAESVKGRFTISRDNTKNTLYLEMNNVRTEDTGYYFCARTGKYYDFWSGYPPGEEYFQDWGQGTLVIVSSASGGSGDKTHTCPPCPAPELLGGPSVFLFPPKPKDTLMISRTPEVTCVVVDVSHEDPEVKFNWYVDGVEVHNAKTKPREEQYNSTYRVVSVLTVLHQDWLNGKEYKCKVSNKALPAPIEKTISKAKGQPREPQVCTLPPSRDELTKNQVSLSCAVKGFYPSDIAVEWESNGQPENNYKTTPPVLDSDGSFFLVSKLTVDKSRWQQGNVFSCSVMHEALHNHYTQKSLSLSPG

SEQ ID NO: 204 - protein, 730 aa, synthetic construct
  REGION 1..730: note = Artificial Sequence
LTQSPGTLSLSPGETAIISCRTSQYGSLAWYQQRPGQAPRLVIYSGSTRAAGIPDRFSGSRWGPDYNLTISNLESGDFGVYYCQQYEFFGQGTKVQVDIKGGSSGQSALTQPASVSGSPGQTITISCNGTSSDVGGFDSVSWYQQSPGKAPKVMVFDVSHRPSGISNRFSGSKSGNTASLTISGLHIEDEGDYFCSSLTDRSHRIFGGGTKVTVLGGGGSGGSGSGGGGSASGSGQEQLVESGGGVVQPGGSLRLSCLASGFTFHKYGMHWVRQAPGKGLEWVALISDDGMRKYHSDSMWGRVTISRDNSKNTLYLQFSSLKVEDTAMFFCAREAGGPIWHDDVKYYDFNDGYYNYHYMDVWGKGTTVTVSSGGSSGQVQLVQSGGQMKKPGESMRISCRASGYEFIDCTLNWIRLAPGKRPEWMGWLKPRGGAVNYARPLQGRVTMTRDVYSDTAFLELRSLTVDDTAVYFCTRGKNCDYNWDFEHWGRGTPVIVSSASGGSGDKTHTCPPCPAPELLGGPSVFLFPPKPKDTLMISRTPEVTCVVVDVSHEDPEVKFNWYVDGVEVHNAKTKPREEQYNSTYRVVSVLTVLHQDWLNGKEYKCKVSNKALPAPIEKTISKAKGQPREPQVYTLPPCRDELTKNQVSLWCLVKGFYPSDIAVEWESNGQPENNYKTTPPVLDSDGSFFLYSKLTVDKSRWQQGNVFSCSVMHEALHNHYTQKSLSLSPG

SEQ ID NO: 205 - protein, 730 aa, synthetic construct
  REGION 1..730: note = Artificial Sequence
QSALTQPASVSGSPGQTITISCNGTSSDVGGFDSVSWYQQSPGKAPKVMVFDVSHRPSGISNRFSGSKSGNTASLTISGLHIEDEGDYFCSSLTDRSHRIFGGGTKVTVLGGSSGLTQSPGTLSLSPGETAIISCRTSQYGSLAWYQQRPGQAPRLVIYSGSTRAAGIPDRFSGSRWGPDYNLTISNLESGDFGVYYCQQYEFFGQGTKVQVDIKGGGGSGGSGSGGGGSASGSGQVQLVQSGGQMKKPGESMRISCRASGYEFIDCTLNWIRLAPGKRPEWMGWLKPRGGAVNYARPLQGRVTMTRDVYSDTAFLELRSLTVDDTAVYFCTRGKNCDYNWDFEHWGRGTPVIVSSGGSSGQEQLVESGGGVVQPGGSLRLSCLASGFTFHKYGMHWVRQAPGKGLEWVALISDDGMRKYHSDSMWGRVTISRDNSKNTLYLQFSSLKVEDTAMFFCAREAGGPIWHDDVKYYDFNDGYYNYHYMDVWGKGTTVTVSSASGGSGDKTHTCPPCPAPELLGGPSVFLFPPKPKDTLMISRTPEVTCVVVDVSHEDPEVKFNWYVDGVEVHNAKTKPREEQYNSTYRVVSVLTVLHQDWLNGKEYKCKVSNKALPAPIEKTISKAKGQPREPQVYTLPPCRDELTKNQVSLWCLVKGFYPSDIAVEWESNGQPENNYKTTPPVLDSDGSFFLYSKLTVDKSRWQQGNVFSCSVMHEALHNHYTQKSLSLSPG

SEQ ID NO: 206 - protein, 746 aa, synthetic construct
  REGION 1..746: note = Artificial Sequence
SDISVAPGETARISCGEKSLGSRAVQWYQHRAGQAPSLIIYNNQDRPSGIPERFSGSPDSPFGTTATLTITSVEAGDEADYYCHIWDSRVPTKWVFGGGTTLTVLGGSSGQSALTQPASVSGSPGQTITISCNGTSSDVGGFDSVSWYQQSPGKAPKVMVFDVSHRPSGISNRFSGSKSGNTASLTISGLHIEDEGDYFCSSLTDRSHRIFGGGTKVTVLGGGGSGGSGSGGGGSASGSGQEQLVESGGGVVQPGGSLRLSCLASGFTFHKYGMHWVRQAPGKGLEWVALISDDGMRKYHSDSMWGRVTISRDNSKNTLYLQFSSLKVEDTAMFFCAREAGGPIWHDDVKYYDFNDGYYNYHYMDVWGKGTTVTVSSGGSSGQMQLQESGPGLVKPSETLSLTCSVSGASISDSYWSWIRRSPGKGLEWIGYVHKSGDTNYSPSLKSRVNLSLDTSKNQVSLSLVAATAADSGKYYCARTLHGRRIYGIVAFNEWFTYFYMDVWGNGTQVTVSSASGGSGDKTHTCPPCPAPELLGGPSVFLFPPKPKDTLMISRTPEVTCVVVDVSHEDPEVKFNWYVDGVEVHNAKTKPREEQYNSTYRVVSVLTVLHQDWLNGKEYKCKVSNKALPAPIEKTISKAKGQPREPQVCTLPPSRDELTKNQVSLSCAVKGFYPSDIAVEWESNGQPENNYKTTPPVLDSDGSFFLVSKLTVDKSRWQQGNVFSCSVMHEALHNHYTQKSLSLSPG

SEQ ID NO: 207 - protein, 746 aa, synthetic construct
  REGION 1..746: note = Artificial Sequence
QSALTQPASVSGSPGQTITISCNGTSSDVGGFDSVSWYQQSPGKAPKVMVFDVSHRPSGISNRFSGSKSGNTASLTISGLHIEDEGDYFCSSLTDRSHRIFGGGTKVTVLGGSSGSDISVAPGETARISCGEKSLGSRAVQWYQHRAGQAPSLIIYNNQDRPSGIPERFSGSPDSPFGTTATLTITSVEAGDEADYYCHIWDSRVPTKWVFGGGTTLTVLGGGGSGGSGSGGGGSASGSGQMQLQESGPGLVKPSETLSLTCSVSGASISDSYWSWIRRSPGKGLEWIGYVHKSGDTNYSPSLKSRVNLSLDTSKNQVSLSLVAATAADSGKYYCARTLHGRRIYGIVAFNEWFTYFYMDVWGNGTQVTVSSGGSSGQEQLVESGGGVVQPGGSLRLSCLASGFTFHKYGMHWVRQAPGKGLEWVALISDDGMRKYHSDSMWGRVTISRDNSKNTLYLQFSSLKVEDTAMFFCAREAGGPIWHDDVKYYDFNDGYYNYHYMDVWGKGTTVTVSSASGGSGDKTHTCPPCPAPELLGGPSVFLFPPKPKDTLMISRTPEVTCVVVDVSHEDPEVKFNWYVDGVEVHNAKTKPREEQYNSTYRVVSVLTVLHQDWLNGKEYKCKVSNKALPAPIEKTISKAKGQPREPQVCTLPPSRDELTKNQVSLSCAVKGFYPSDIAVEWESNGQPENNYKTTPPVLDSDGSFFLVSKLTVDKSRWQQGNVFSCSVMHEALHNHYTQKSLSLSPG

SEQ ID NO: 208 - protein, 722 aa, synthetic construct
  REGION 1..722: note = Artificial Sequence
LTQSPGTLSLSPGETAIISCRTSQYGSLAWYQQRPGQAPRLVIYSGSTRAAGIPDRFSGSRWGPDYNLTISNLESGDFGVYYCQQYEFFGQGTKVQVDIKGGSSGSELTQDPAVSVALKQTVTITCRGDSLRSHYASWYQKKPGQAPVLLFYGKNNRPSGIPDRFSGSASGNRASLTITGAQAEDEADYYCSSRDKSGSRLSVFGGGTKLTVLGGGGSGGSGSGGGGSASGSGEVRLVESGGGLVKPGGSLRLSCSASGFDFDNAWMTWVRQPPGKGLEWVGRITGPGEGWSVDYAESVKGRFTISRDNTKNTLYLEMNNVRTEDTGYYFCARTGKYYDFWSGYPPGEEYFQDWGQGTLVIVSSGGSSGQVQLVQSGGQMKKPGESMRISCRASGYEFIDCTLNWIRLAPGKRPEWMGWLKPRGGAVNYARPLQGRVTMTRDVYSDTAFLELRSLTVDDTAVYFCTRGKNCDYNWDFEHWGRGTPVIVSSASGGSGDKTHTCPPCPAPELLGGPSVFLFPPKPKDTLMISRTPEVTCVVVDVSHEDPEVKFNWYVDGVEVHNAKTKPREEQYNSTYRVVSVLTVLHQDWLNGKEYKCKVSNKALPAPIEKTISKAKGQPREPQVYTLPPCRDELTKNQVSLWCLVKGFYPSDIAVEWESNGQPENNYKTTPPVLDSDGSFFLYSKLTVDKSRWQQGNVFSCSVMHEALHNHYTQKSLSLSPG

SEQ ID NO: 209 - protein, 722 aa, synthetic construct
  REGION 1..722: note = Artificial Sequence
SELTQDPAVSVALKQTVTITCRGDSLRSHYASWYQKKPGQAPVLLFYGKNNRPSGIPDRFSGSASGNRASLTITGAQAEDEADYYCSSRDKSGSRLSVFGGGTKLTVLGGSSGLTQSPGTLSLSPGETAIISCRTSQYGSLAWYQQRPGQAPRLVIYSGSTRAAGIPDRFSGSRWGPDYNLTISNLESGDFGVYYCQQYEFFGQGTKVQVDIKGGGGSGGSGSGGGGSASGSGQVQLVQSGGQMKKPGESMRISCRASGYEFIDCTLNWIRLAPGKRPEWMGWLKPRGGAVNYARPLQGRVTMTRDVYSDTAFLELRSLTVDDTAVYFCTRGKNCDYNWDFEHWGRGTPVIVSSGGSSGEVRLVESGGGLVKPGGSLRLSCSASGFDFDNAWMTWVRQPPGKGLEWVGRITGPGEGWSVDYAESVKGRFTISRDNTKNTLYLEMNNVRTEDTGYYFCARTGKYYDFWSGYPPGEEYFQDWGQGTLVIVSSASGGSGDKTHTCPPCPAPELLGGPSVFLFPPKPKDTLMISRTPEVTCVVVDVSHEDPEVKFNWYVDGVEVHNAKTKPREEQYNSTYRVVSVLTVLHQDWLNGKEYKCKVSNKALPAPIEKTISKAKGQPREPQVYTLPPCRDELTKNQVSLWCLVKGFYPSDIAVEWESNGQPENNYKTTPPVLDSDGSFFLYSKLTVDKSRWQQGNVFSCSVMHEALHNHYTQKSLSLSPG

SEQ ID NO: 210 - protein, 578 aa, synthetic construct
  REGION 1..578: note = Artificial Sequence
QVQLVQSGAEVVKPGASVKVSCKASGYTFTSYAMHWVKEAPGQRLEWIGYIYPGQGGTNYNQKFQGRATLTADTSASTAYMELSSLRSEDTAVYFCARTGGLRRAYFTYWGQGTLVTVSSGGSGSSGQVQLVESGGGVVQPGRSLRLSCAASGFTFTKAWMHWVRQAPGKQLEWVAQIKDKSNSYATYYADSVKGRFTISRDDSKNTLYLQMNSLRAEDTAVYYCRGVYYALSPFDYWGQGTLVTVSSASTKGPSVFPLAPSSKSTSGGTAALGCLVKDYFPEPVTVSWNSGALTSGVHTFPAVLQSSGLYSLSSVVTVPSSSLGTQTYICNVNHKPSNTKVDKKVEPKSCDKTHTCPPCPAPELLGGPSVFLFPPKPKDTLMISRTPEVTCVVVDVSHEDPEVKFNWYVDGVEVHNAKTKPREEQYNSTYRVVSVLTVLHQDWLNGKEYKCKVSNKALPAPIEKTISKAKGQPREPQVYTLPPSRDELTKNQVSLTCLVKGFYPSDIAVEWESNGQPENNYKTTPPVLDSDGSFFLYSKLTVDKSRWQQGNVFSCSVMHEALHNHYTQKSLSLSPGK

SEQ ID NO: 211 - protein, 337 aa, synthetic construct
  REGION 1..337: note = Artificial Sequence
DIVLTQSPATLSLSPGERATISCRASQSVSSYGQGFMHWYQQKPGQPPRLLIYGASSRATGIPARFSGSGSGTDFTLTISPLEPEDFAVYYCQQNKEDPWTFGGGTKLEIKGGSGSSGDIVMTQTPLSLSVTPGQPASISCKSSQSLVHNNANTYLSWYLQKPGQSPQSLIYKVSNRFSGVPDRFSGSGSGTDFTLKISRVEAEDVGVYYCGQGTQYPFTFGSGTKVEIKRTVAAPSVFIFPPSDEQLKSGTASVVCLLNNFYPREAKVQWKVDNALQSGNSQESVTEQDSKDSTYSLSSTLTLSKADYEKHKVYACEVTHQGLSSPVTKSFNRGEC

SEQ ID NO: 212 - protein, 577 aa, synthetic construct
  REGION 1..577: note = Artificial Sequence
QVQLVQSGAEVVKPGASVKVSCKASGYTFTSYAMHWVKEAPGQRLEWIGYIYPGQGGTNYNQKFQGRATLTADTSASTAYMELSSLRSEDTAVYFCARTGGLRRAYFTYWGQGTLVTVSSGPAALVQVQLVESGGGVVQPGRSLRLSCAASGFTFTKAWMHWVRQAPGKQLEWVAQIKDKSNSYATYYADSVKGRFTISRDDSKNTLYLQMNSLRAEDTAVYYCRGVYYALSPFDYWGQGTLVTVSSASTKGPSVFPLAPSSKSTSGGTAALGCLVKDYFPEPVTVSWNSGALTSGVHTFPAVLQSSGLYSLSSVVTVPSSSLGTQTYICNVNHKPSNTKVDKKVEPKSCDKTHTCPPCPAPELLGGPSVFLFPPKPKDTLMISRTPEVTCVVVDVSHEDPEVKFNWYVDGVEVHNAKTKPREEQYNSTYRVVSVLTVLHQDWLNGKEYKCKVSNKALPAPIEKTISKAKGQPREPQVYTLPPSRDELTKNQVSLTCLVKGFYPSDIAVEWESNGQPENNYKTTPPVLDSDGSFFLYSKLTVDKSRWQQGNVFSCSVMHEALHNHYTQKSLSLSPGK

SEQ ID NO: 213 - protein, 336 aa, synthetic construct
  REGION 1..336: note = Artificial Sequence
DIVLTQSPATLSLSPGERATISCRASQSVSSYGQGFMHWYQQKPGQPPRLLIYGASSRATGIPARFSGSGSGTDFTLTISPLEPEDFAVYYCQQNKEDPWTFGGGTKLEIKGPAALVDIVMTQTPLSLSVTPGQPASISCKSSQSLVHNNANTYLSWYLQKPGQSPQSLIYKVSNRFSGVPDRFSGSGSGTDFTLKISRVEAEDVGVYYCGQGTQYPFTFGSGTKVEIKRTVAAPSVFIFPPSDEQLKSGTASVVCLLNNFYPREAKVQWKVDNALQSGNSQESVTEQDSKDSTYSLSSTLTLSKADYEKHKVYACEVTHQGLSSPVTKSFNRGEC

SEQ ID NO: 214 - protein, 578 aa, synthetic construct
  REGION 1..578: note = Artificial Sequence
QVQLVQSGAEVVKPGASVKVSCKASGYTFTSYAMHWVKEAPGQRLEWIGYIYPGQGGTNYNQKFQGRATLTADTSASTAYMELSSLRSEDTAVYFCARTGGLRRAYFTYWGQGTLVTVSSGPLGLTGQVQLVESGGGVVQPGRSLRLSCAASGFTFTKAWMHWVRQAPGKQLEWVAQIKDKSNSYATYYADSVKGRFTISRDDSKNTLYLQMNSLRAEDTAVYYCRGVYYALSPFDYWGQGTLVTVSSASTKGPSVFPLAPSSKSTSGGTAALGCLVKDYFPEPVTVSWNSGALTSGVHTFPAVLQSSGLYSLSSVVTVPSSSLGTQTYICNVNHKPSNTKVDKKVEPKSCDKTHTCPPCPAPELLGGPSVFLFPPKPKDTLMISRTPEVTCVVVDVSHEDPEVKFNWYVDGVEVHNAKTKPREEQYNSTYRVVSVLTVLHQDWLNGKEYKCKVSNKALPAPIEKTISKAKGQPREPQVYTLPPSRDELTKNQVSLTCLVKGFYPSDIAVEWESNGQPENNYKTTPPVLDSDGSFFLYSKLTVDKSRWQQGNVFSCSVMHEALHNHYTQKSLSLSPGK

SEQ ID NO: 215 - protein, 337 aa, synthetic construct
  REGION 1..337: note = Artificial Sequence
DIVLTQSPATLSLSPGERATISCRASQSVSSYGQGFMHWYQQKPGQPPRLLIYGASSRATGIPARFSGSGSGTDFTLTISPLEPEDFAVYYCQQNKEDPWTFGGGTKLEIKGPLGLTGDIVMTQTPLSLSVTPGQPASISCKSSQSLVHNNANTYLSWYLQKPGQSPQSLIYKVSNRFSGVPDRFSGSGSGTDFTLKISRVEAEDVGVYYCGQGTQYPFTFGSGTKVEIKRTVAAPSVFIFPPSDEQLKSGTASVVCLLNNFYPREAKVQWKVDNALQSGNSQESVTEQDSKDSTYSLSSTLTLSKADYEKHKVYACEVTHQGLSSPVTKSFNRGEC

SEQ ID NO: 216 - protein, 578 aa, synthetic construct
  REGION 1..578: note = Artificial Sequence
QVQLVQSGAEVVKPGASVKVSCKASGYTFTSYAMHWVKEAPGQRLEWIGYIYPGQGGTNYNQKFQGRATLTADTSASTAYMELSSLRSEDTAVYFCARTGGLRRAYFTYWGQGTLVTVSSGPSGLVGQVQLVESGGGVVQPGRSLRLSCAASGFTFTKAWMHWVRQAPGKQLEWVAQIKDKSNSYATYYADSVKGRFTISRDDSKNTLYLQMNSLRAEDTAVYYCRGVYYALSPFDYWGQGTLVTVSSASTKGPSVFPLAPSSKSTSGGTAALGCLVKDYFPEPVTVSWNSGALTSGVHTFPAVLQSSGLYSLSSVVTVPSSSLGTQTYICNVNHKPSNTKVDKKVEPKSCDKTHTCPPCPAPELLGGPSVFLFPPKPKDTLMISRTPEVTCVVVDVSHEDPEVKFNWYVDGVEVHNAKTKPREEQYNSTYRVVSVLTVLHQDWLNGKEYKCKVSNKALPAPIEKTISKAKGQPREPQVYTLPPSRDELTKNQVSLTCLVKGFYPSDIAVEWESNGQPENNYKTTPPVLDSDGSFFLYSKLTVDKSRWQQGNVFSCSVMHEALHNHYTQKSLSLSPGK

SEQ ID NO: 217 - protein, 337 aa, synthetic construct
  REGION 1..337: note = Artificial Sequence
DIVLTQSPATLSLSPGERATISCRASQSVSSYGQGFMHWYQQKPGQPPRLLIYGASSRATGIPARFSGSGSGTDFTLTISPLEPEDFAVYYCQQNKEDPWTFGGGTKLEIKGPSGLVGDIVMTQTPLSLSVTPGQPASISCKSSQSLVHNNANTYLSWYLQKPGQSPQSLIYKVSNRFSGVPDRFSGSGSGTDFTLKISRVEAEDVGVYYCGQGTQYPFTFGSGTKVEIKRTVAAPSVFIFPPSDEQLKSGTASVVCLLNNFYPREAKVQWKVDNALQSGNSQESVTEQDSKDSTYSLSSTLTLSKADYEKHKVYACEVTHQGLSSPVTKSFNRGEC

SEQ ID NO: 218 - protein, 577 aa, synthetic construct
  REGION 1..577: note = Artificial Sequence
QVQLVQSGAEVVKPGASVKVSCKASGYTFTSYAMHWVKEAPGQRLEWIGYIYPGQGGTNYNQKFQGRATLTADTSASTAYMELSSLRSEDTAVYFCARTGGLRRAYFTYWGQGTLVTVSSGSGRKGQVQLVESGGGVVQPGRSLRLSCAASGFTFTKAWMHWVRQAPGKQLEWVAQIKDKSNSYATYYADSVKGRFTISRDDSKNTLYLQMNSLRAEDTAVYYCRGVYYALSPFDYWGQGTLVTVSSASTKGPSVFPLAPSSKSTSGGTAALGCLVKDYFPEPVTVSWNSGALTSGVHTFPAVLQSSGLYSLSSVVTVPSSSLGTQTYICNVNHKPSNTKVDKKVEPKSCDKTHTCPPCPAPELLGGPSVFLFPPKPKDTLMISRTPEVTCVVVDVSHEDPEVKFNWYVDGVEVHNAKTKPREEQYNSTYRVVSVLTVLHQDWLNGKEYKCKVSNKALPAPIEKTISKAKGQPREPQVYTLPPSRDELTKNQVSLTCLVKGFYPSDIAVEWESNGQPENNYKTTPPVLDSDGSFFLYSKLTVDKSRWQQGNVFSCSVMHEALHNHYTQKSLSLSPGK

SEQ ID NO: 219 - protein, 336 aa, synthetic construct
  REGION 1..336: note = Artificial Sequence
DIVLTQSPATLSLSPGERATISCRASQSVSSYGQGFMHWYQQKPGQPPRLLIYGASSRATGIPARFSGSGSGTDFTLTISPLEPEDFAVYYCQQNKEDPWTFGGGTKLEIKGSGRKGDIVMTQTPLSLSVTPGQPASISCKSSQSLVHNNANTYLSWYLQKPGQSPQSLIYKVSNRFSGVPDRFSGSGSGTDFTLKISRVEAEDVGVYYCGQGTQYPFTFGSGTKVEIKRTVAAPSVFIFPPSDEQLKSGTASVVCLLNNFYPREAKVQWKVDNALQSGNSQESVTEQDSKDSTYSLSSTLTLSKADYEKHKVYACEVTHQGLSSPVTKSFNRGEC

SEQ ID NO: 220 - protein, 579 aa, synthetic construct
  REGION 1..579: note = Artificial Sequence
QVQLVQSGAEVVKPGASVKVSCKASGYTFTSYAMHWVKEAPGQRLEWIGYIYPGQGGTNYNQKFQGRATLTADTSASTAYMELSSLRSEDTAVYFCARTGGLRRAYFTYWGQGTLVTVSSASTRKAGGQVQLVESGGGVVQPGRSLRLSCAASGFTFTKAWMHWVRQAPGKQLEWVAQIKDKSNSYATYYADSVKGRFTISRDDSKNTLYLQMNSLRAEDTAVYYCRGVYYALSPFDYWGQGTLVTVSSASTKGPSVFPLAPSSKSTSGGTAALGCLVKDYFPEPVTVSWNSGALTSGVHTFPAVLQSSGLYSLSSVVTVPSSSLGTQTYICNVNHKPSNTKVDKKVEPKSCDKTHTCPPCPAPELLGGPSVFLFPPKPKDTLMISRTPEVTCVVVDVSHEDPEVKFNWYVDGVEVHNAKTKPREEQYNSTYRVVSVLTVLHQDWLNGKEYKCKVSNKALPAPIEKTISKAKGQPREPQVYTLPPSRDELTKNQVSLTCLVKGFYPSDIAVEWESNGQPENNYKTTPPVLDSDGSFFLYSKLTVDKSRWQQGNVFSCSVMHEALHNHYTQKSLSLSPGK

SEQ ID NO: 221 - protein, 338 aa, synthetic construct
  REGION 1..338: note = Artificial Sequence
DIVLTQSPATLSLSPGERATISCRASQSVSSYGQGFMHWYQQKPGQPPRLLIYGASSRATGIPARFSGSGSGTDFTLTISPLEPEDFAVYYCQQNKEDPWTFGGGTKLEIKASTRKAGGDIVMTQTPLSLSVTPGQPASISCKSSQSLVHNNANTYLSWYLQKPGQSPQSLIYKVSNRFSGVPDRFSGSGSGTDFTLKISRVEAEDVGVYYCGQGTQYPFTFGSGTKVEIKRTVAAPSVFIFPPSDEQLKSGTASVVCLLNNFYPREAKVQWKVDNALQSGNSQESVTEQDSKDSTYSLSSTLTLSKADYEKHKVYACEVTHQGLSSPVTKSFNRGEC

SEQ ID NO: 222 - protein, 573 aa, synthetic construct
  REGION 1..573: note = Artificial Sequence
QVQLVQSGAEVKKPGASVKVSCKASGYTFTSYYIHWVRQAPGQGLEWIGSIYPGNVNTNYNEKFKDRATLTVDTSISTAYMELSRLRSDDTAVYFCTRSHYGLDWNFDVWGQGTTVTVSSGGSGSDIKLQQSGAELARPGASVKMSCKTSGYTFTRYTMHWVKQRPGQGLEWIGYINPSRGYTNYNQKFKDKATLTTDKSSSTAYMQLSSLTSEDSAVYYCARYYDDHYSLDYWGQGTTLTVSSASTKGPSVFPLAPSSKSTSGGTAALGCLVKDYFPEPVTVSWNSGALTSGVHTFPAVLQSSGLYSLSSVVTVPSSSLGTQTYICNVNHKPSNTKVDKKVEPKSCDKTHTCPPCPAPEAAGGPSVFLFPPKPKDTLMISRTPEVTCVVVDVSHEDPEVKFNWYVDGVEVHNAKTKPREEQYNSTYRVVSVLTVLHQDWLNGKEYKCKVSNKALAAPIEKTISKAKGQPREPQVCTLPPSRDELTKNQVSLSCAVKGFYPSDIAVEWESNGQPENNYKTTPPVLDSDGSFFLVSKLTVDKSRWQQGNVFSCSVMHEALHNHYTQKSLSLSPG

SEQ ID NO: 223 - protein, 325 aa, synthetic construct
  REGION 1..325: note = Artificial Sequence
DIQMTQSPSSLSASVGDRVTITCHASQNIYVWLNWYQQKPGKAPKLLIYKASNLHTGVPSRFSGSGSGTDFTLTISSLQPEDFATYYCQQGQTYPYTFGGGTKVEIKGGSGSDIQLTQSPAIMSASPGEKVTMTCRASSSVSYMNWYQQKSGTSPKRWIYDTSKVASGVPYRFSGSGSGTSYSLTISSMEAEDAATYYCQQWSSNPLTFGAGTKLELKRTVAAPSVFIFPPSDEQLKSGTASVVCLLNNFYPREAKVQWKVDNALQSGNSQESVTEQDSKDSTYSLSSTLTLSKADYEKHKVYACEVTHQGLSSPVTKSFNRGEC

SEQ ID NO: 224 - protein, 575 aa, synthetic construct
  REGION 1..575: note = Artificial Sequence
QVQLVQSGAEVKKPGASVKVSCKASGYTFTSYYIHWVRQAPGQGLEWIGSIYPGNVNTNYNEKFKDRATLTVDTSISTAYMELSRLRSDDTAVYFCTRSHYGLDWNFDVWGQGTTVTVSSGPSGLVGDIKLQQSGAELARPGASVKMSCKTSGYTFTRYTMHWVKQRPGQGLEWIGYINPSRGYTNYNQKFKDKATLTTDKSSSTAYMQLSSLTSEDSAVYYCARYYDDHYSLDYWGQGTTLTVSSASTKGPSVFPLAPSSKSTSGGTAALGCLVKDYFPEPVTVSWNSGALTSGVHTFPAVLQSSGLYSLSSVVTVPSSSLGTQTYICNVNHKPSNTKVDKKVEPKSCDKTHTCPPCPAPEAAGGPSVFLFPPKPKDTLMISRTPEVTCVVVDVSHEDPEVKFNWYVDGVEVHNAKTKPREEQYNSTYRVVSVLTVLHQDWLNGKEYKCKVSNKALAAPIEKTISKAKGQPREPQVCTLPPSRDELTKNQVSLSCAVKGFYPSDIAVEWESNGQPENNYKTTPPVLDSDGSFFLVSKLTVDKSRWQQGNVFSCSVMHEALHNHYTQKSLSLSPG

SEQ ID NO: 225 - protein, 327 aa, synthetic construct
  REGION 1..327: note = Artificial Sequence
DIQMTQSPSSLSASVGDRVTITCHASQNIYVWLNWYQQKPGKAPKLLIYKASNLHTGVPSRFSGSGSGTDFTLTISSLQPEDFATYYCQQGQTYPYTFGGGTKVEIKGPSGLVGDIQLTQSPAIMSASPGEKVTMTCRASSSVSYMNWYQQKSGTSPKRWIYDTSKVASGVPYRFSGSGSGTSYSLTISSMEAEDAATYYCQQWSSNPLTFGAGTKLELKRTVAAPSVFIFPPSDEQLKSGTASVVCLLNNFYPREAKVQWKVDNALQSGNSQESVTEQDSKDSTYSLSSTLTLSKADYEKHKVYACEVTHQGLSSPVTKSFNRGEC

SEQ ID NO: 226 - protein, 575 aa, synthetic construct
  REGION 1..575: note = Artificial Sequence
QVQLVQSGAEVKKPGASVKVSCKASGYTFTSYYIHWVRQAPGQGLEWIGSIYPGNVNTNYNEKFKDRATLTVDTSISTAYMELSRLRSDDTAVYFCTRSHYGLDWNFDVWGQGTTVTVSSGPAGLVGDIKLQQSGAELARPGASVKMSCKTSGYTFTRYTMHWVKQRPGQGLEWIGYINPSRGYTNYNQKFKDKATLTTDKSSSTAYMQLSSLTSEDSAVYYCARYYDDHYSLDYWGQGTTLTVSSASTKGPSVFPLAPSSKSTSGGTAALGCLVKDYFPEPVTVSWNSGALTSGVHTFPAVLQSSGLYSLSSVVTVPSSSLGTQTYICNVNHKPSNTKVDKKVEPKSCDKTHTCPPCPAPEAAGGPSVFLFPPKPKDTLMISRTPEVTCVVVDVSHEDPEVKFNWYVDGVEVHNAKTKPREEQYNSTYRVVSVLTVLHQDWLNGKEYKCKVSNKALAAPIEKTISKAKGQPREPQVCTLPPSRDELTKNQVSLSCAVKGFYPSDIAVEWESNGQPENNYKTTPPVLDSDGSFFLVSKLTVDKSRWQQGNVFSCSVMHEALHNHYTQKSLSLSPG

SEQ ID NO: 227 - protein, 327 aa, synthetic construct
  REGION 1..327: note = Artificial Sequence
DIQMTQSPSSLSASVGDRVTITCHASQNIYVWLNWYQQKPGKAPKLLIYKASNLHTGVPSRFSGSGSGTDFTLTISSLQPEDFATYYCQQGQTYPYTFGGGTKVEIKGPAGLVGDIQLTQSPAIMSASPGEKVTMTCRASSSVSYMNWYQQKSGTSPKRWIYDTSKVASGVPYRFSGSGSGTSYSLTISSMEAEDAATYYCQQWSSNPLTFGAGTKLELKRTVAAPSVFIFPPSDEQLKSGTASVVCLLNNFYPREAKVQWKVDNALQSGNSQESVTEQDSKDSTYSLSSTLTLSKADYEKHKVYACEVTHQGLSSPVTKSFNRGEC

SEQ ID NO: 228 - protein, 576 aa, synthetic construct
  REGION 1..576: note = Artificial Sequence
QVQLVQSGAEVKKPGASVKVSCKASGYTFTSYYIHWVRQAPGQGLEWIGSIYPGNVNTNYNEKFKDRATLTVDTSISTAYMELSRLRSDDTAVYFCTRSHYGLDWNFDVWGQGTTVTVSSGPAGLVSGDIKLQQSGAELARPGASVKMSCKTSGYTFTRYTMHWVKQRPGQGLEWIGYINPSRGYTNYNQKFKDKATLTTDKSSSTAYMQLSSLTSEDSAVYYCARYYDDHYSLDYWGQGTTLTVSSASTKGPSVFPLAPSSKSTSGGTAALGCLVKDYFPEPVTVSWNSGALTSGVHTFPAVLQSSGLYSLSSVVTVPSSSLGTQTYICNVNHKPSNTKVDKKVEPKSCDKTHTCPPCPAPEAAGGPSVFLFPPKPKDTLMISRTPEVTCVVVDVSHEDPEVKFNWYVDGVEVHNAKTKPREEQYNSTYRVVSVLTVLHQDWLNGKEYKCKVSNKALAAPIEKTISKAKGQPREPQVCTLPPSRDELTKNQVSLSCAVKGFYPSDIAVEWESNGQPENNYKTTPPVLDSDGSFFLVSKLTVDKSRWQQGNVFSCSVMHEALHNHYTQKSLSLSPG

SEQ ID NO: 229 - protein, 328 aa, synthetic construct
  REGION 1..328: note = Artificial Sequence
DIQMTQSPSSLSASVGDRVTITCHASQNIYVWLNWYQQKPGKAPKLLIYKASNLHTGVPSRFSGSGSGTDFTLTISSLQPEDFATYYCQQGQTYPYTFGGGTKVEIKGPAGLVSGDIQLTQSPAIMSASPGEKVTMTCRASSSVSYMNWYQQKSGTSPKRWIYDTSKVASGVPYRFSGSGSGTSYSLTISSMEAEDAATYYCQQWSSNPLTFGAGTKLELKRTVAAPSVFIFPPSDEQLKSGTASVVCLLNNFYPREAKVQWKVDNALQSGNSQESVTEQDSKDSTYSLSSTLTLSKADYEKHKVYACEVTHQGLSSPVTKSFNRGEC

SEQ ID NO: 230 - protein, 576 aa, synthetic construct
  REGION 1..576: note = Artificial Sequence
QVQLVQSGAEVKKPGASVKVSCKASGYTFTSYYIHWVRQAPGQGLEWIGSIYPGNVNTNYNEKFKDRATLTVDTSISTAYMELSRLRSDDTAVYFCTRSHYGLDWNFDVWGQGTTVTVSSASTRKAGGDIKLQQSGAELARPGASVKMSCKTSGYTFTRYTMHWVKQRPGQGLEWIGYINPSRGYTNYNQKFKDKATLTTDKSSSTAYMQLSSLTSEDSAVYYCARYYDDHYSLDYWGQGTTLTVSSASTKGPSVFPLAPSSKSTSGGTAALGCLVKDYFPEPVTVSWNSGALTSGVHTFPAVLQSSGLYSLSSVVTVPSSSLGTQTYICNVNHKPSNTKVDKKVEPKSCDKTHTCPPCPAPEAAGGPSVFLFPPKPKDTLMISRTPEVTCVVVDVSHEDPEVKFNWYVDGVEVHNAKTKPREEQYNSTYRVVSVLTVLHQDWLNGKEYKCKVSNKALAAPIEKTISKAKGQPREPQVCTLPPSRDELTKNQVSLSCAVKGFYPSDIAVEWESNGQPENNYKTTPPVLDSDGSFFLVSKLTVDKSRWQQGNVFSCSVMHEALHNHYTQKSLSLSPG

SEQ ID NO: 231 - protein, 328 aa, synthetic construct
  REGION 1..328: note = Artificial Sequence
DIQMTQSPSSLSASVGDRVTITCHASQNIYVWLNWYQQKPGKAPKLLIYKASNLHTGVPSRFSGSGSGTDFTLTISSLQPEDFATYYCQQGQTYPYTFGGGTKVEIKASTRKAGGDIQLTQSPAIMSASPGEKVTMTCRASSSVSYMNWYQQKSGTSPKRWIYDTSKVASGVPYRFSGSGSGTSYSLTISSMEAEDAATYYCQQWSSNPLTFGAGTKLELKRTVAAPSVFIFPPSDEQLKSGTASVVCLLNNFYPREAKVQWKVDNALQSGNSQESVTEQDSKDSTYSLSSTLTLSKADYEKHKVYACEVTHQGLSSPVTKSFNRGEC

SEQ ID NO: 232 - protein, 575 aa, synthetic construct
  REGION 1..575: note = Artificial Sequence
QVQLVQSGAEVKKPGASVKVSCKASGYTFTSYYIHWVRQAPGQGLEWIGSIYPGNVNTNYNEKFKDRATLTVDTSISTAYMELSRLRSDDTAVYFCTRSHYGLDWNFDVWGQGTTVTVSSASTRKAGDIKLQQSGAELARPGASVKMSCKTSGYTFTRYTMHWVKQRPGQGLEWIGYINPSRGYTNYNQKFKDKATLTTDKSSSTAYMQLSSLTSEDSAVYYCARYYDDHYSLDYWGQGTTLTVSSASTKGPSVFPLAPSSKSTSGGTAALGCLVKDYFPEPVTVSWNSGALTSGVHTFPAVLQSSGLYSLSSVVTVPSSSLGTQTYICNVNHKPSNTKVDKKVEPKSCDKTHTCPPCPAPEAAGGPSVFLFPPKPKDTLMISRTPEVTCVVVDVSHEDPEVKFNWYVDGVEVHNAKTKPREEQYNSTYRVVSVLTVLHQDWLNGKEYKCKVSNKALAAPIEKTISKAKGQPREPQVCTLPPSRDELTKNQVSLSCAVKGFYPSDIAVEWESNGQPENNYKTTPPVLDSDGSFFLVSKLTVDKSRWQQGNVFSCSVMHEALHNHYTQKSLSLSPG

SEQ ID NO: 233 - protein, 327 aa, synthetic construct
  REGION 1..327: note = Artificial Sequence
DIQMTQSPSSLSASVGDRVTITCHASQNIYVWLNWYQQKPGKAPKLLIYKASNLHTGVPSRFSGSGSGTDFTLTISSLQPEDFATYYCQQGQTYPYTFGGGTKVEIKASTRKAGDIQLTQSPAIMSASPGEKVTMTCRASSSVSYMNWYQQKSGTSPKRWIYDTSKVASGVPYRFSGSGSGTSYSLTISSMEAEDAATYYCQQWSSNPLTFGAGTKLELKRTVAAPSVFIFPPSDEQLKSGTASVVCLLNNFYPREAKVQWKVDNALQSGNSQESVTEQDSKDSTYSLSSTLTLSKADYEKHKVYACEVTHQGLSSPVTKSFNRGEC

SEQ ID NO: 234 - protein, 725 aa, synthetic construct
  REGION 1..725: note = Artificial Sequence
DIVMTQSPDSLAVSLGERATINCKSSQSLLYTSSQKNYLAWYQQKPGQPPKLLIYWASTRESGVPDRFSGSGSGTDFTLTISSLQAEDVAVYYCQQYYAYPWTFGGGTKLEIKGGSSGEIVLTQSPATLSLSPGERATLSCRASQSVDSYGNSFLHWYQQKPGQAPRLLIYWASNRATGIPARFSGSGSGTDFTLTISSLEPEDFAVYYCQQNNEDLWTFGGGTKLEIKGGGGSGGSGSGGGGSASGSGEVQLVESGGGLVKPGGSLRLSCAASGFTFQNYAMSWVRQAPGKGLEWVSSISSDATYTYYADSVKGRFTISRDNAKNVLYLQMTSLRAEDTAVYYCARHPPSYYYAFDYWGQGTTLTVSSGGSSGQVQLVQSGAEVVKPGASVKLSCKASGYTFTSYWLHWVRQAPGQGLEWVGMIDPSNSDTRFNPNFKDRVTITADTSTSTAYMELSSLRSEDTAVYYCATYKSYVSPLDYWGQGTSVTVSSASGGSGDKTHTCPPCPAPEAAGGPSVFLFPPKPKDTLMISRTPEVTCVVVDVSHEDPEVKFNWYVDGVEVHNAKTKPREEQYNSTYRVVSVLTVLHQDWLNGKEYKCKVSNKALAAPIEKTISKAKGQPREPQVYTLPPCRDELTKNQVSLWCLVKGFYPSDIAVEWESNGQPENNYKTTPPVLDSDGSFFLYSKLTVDKSRWQQGNVFSCSVMHEALHNHYTQKSLSLSPG

SEQ ID NO: 235 - protein, 725 aa, synthetic construct
  REGION 1..725: note = Artificial Sequence
EIVLTQSPATLSLSPGERATLSCRASQSVDSYGNSFLHWYQQKPGQAPRLLIYWASNRATGIPARFSGSGSGTDFTLTISSLEPEDFAVYYCQQNNEDLWTFGGGTKLEIKGGSSGDIVMTQSPDSLAVSLGERATINCKSSQSLLYTSSQKNYLAWYQQKPGQPPKLLIYWASTRESGVPDRFSGSGSGTDFTLTISSLQAEDVAVYYCQQYYAYPWTFGGGTKLEIKGGGGSGGSGSGGGGSASGSGQVQLVQSGAEVVKPGASVKLSCKASGYTFTSYWLHWVRQAPGQGLEWVGMIDPSNSDTRFNPNFKDRVTITADTSTSTAYMELSSLRSEDTAVYYCATYKSYVSPLDYWGQGTSVTVSSGGSSGEVQLVESGGGLVKPGGSLRLSCAASGFTFQNYAMSWVRQAPGKGLEWVSSISSDATYTYYADSVKGRFTISRDNAKNVLYLQMTSLRAEDTAVYYCARHPPSYYYAFDYWGQGTTLTVSSASGGSGDKTHTCPPCPAPEAAGGPSVFLFPPKPKDTLMISRTPEVTCVVVDVSHEDPEVKFNWYVDGVEVHNAKTKPREEQYNSTYRVVSVLTVLHQDWLNGKEYKCKVSNKALAAPIEKTISKAKGQPREPQVYTLPPCRDELTKNQVSLWCLVKGFYPSDIAVEWESNGQPENNYKTTPPVLDSDGSFFLYSKLTVDKSRWQQGNVFSCSVMHEALHNHYTQKSLSLSPG

SEQ ID NO: 236 - protein, 573 aa, synthetic construct
  REGION 1..573: note = Artificial Sequence
QVQLVQSGAEVKKPGASVKVSCKASGYTFTSYYIHWVRQAPGQGLEWIGSIYPGNVNTNYNEKFKDRATLTVDTSISTAYMELSRLRSDDTAVYFCTRSHYGLDWNFDVWGQGTTVTVSSGGSGSQVQLVQSGAEVAKPGASVKVSCKASGYTFTRYTMHWVKQAPGQGLEWIGYINPSRGYTNYAQKFQGKATLTTDKSTSTAYMELSSLRSEDTAVYYCARYYDDHYSLDYWGQGTTLTVSSASTKGPSVFPLAPSSKSTSGGTAALGCLVKDYFPEPVTVSWNSGALTSGVHTFPAVLQSSGLYSLSSVVTVPSSSLGTQTYICNVNHKPSNTKVDKKVEPKSCDKTHTCPPCPAPEAAGGPSVFLFPPKPKDTLMISRTPEVTCVVVDVSHEDPEVKFNWYVDGVEVHNAKTKPREEQYNSTYRVVSVLTVLHQDWLNGKEYKCKVSNKALAAPIEKTISKAKGQPREPQVCTLPPSRDELTKNQVSLSCAVKGFYPSDIAVEWESNGQPENNYKTTPPVLDSDGSFFLVSKLTVDKSRWQQGNVFSCSVMHEALHNHYTQKSLSLSPG

SEQ ID NO: 237 - protein, 325 aa, synthetic construct
  REGION 1..325: note = Artificial Sequence
DIQMTQSPSSLSASVGDRVTITCHASQNIYVWLNWYQQKPGKAPKLLIYKASNLHTGVPSRFSGSGSGTDFTLTISSLQPEDFATYYCQQGQTYPYTFGGGTKVEIKGGSGSDIQLTQSPSSLSASVGDRVTITCRASQSISYLNWYQQKPGKSPKRWIYDTSKLASGVPSRFSGSGSGTDYTLTISSMQPEDAATYYCQQWSSNPLTFGGGTKVEIKRTVAAPSVFIFPPSDEQLKSGTASVVCLLNNFYPREAKVQWKVDNALQSGNSQESVTEQDSKDSTYSLSSTLTLSKADYEKHKVYACEVTHQGLSSPVTKSFNRGEC

SEQ ID NO: 238 - protein, 575 aa, synthetic construct
  REGION 1..575: note = Artificial Sequence
QVQLVQSGAEVKKPGASVKVSCKASGYTFTSYYIHWVRQAPGQGLEWIGSIYPGNVNTNYNEKFKDRATLTVDTSISTAYMELSRLRSDDTAVYFCTRSHYGLDWNFDVWGQGTTVTVSSGPSGLVGQVQLVQSGAEVAKPGASVKVSCKASGYTFTRYTMHWVKQAPGQGLEWIGYINPSRGYTNYAQKFQGKATLTTDKSTSTAYMELSSLRSEDTAVYYCARYYDDHYSLDYWGQGTTLTVSSASTKGPSVFPLAPSSKSTSGGTAALGCLVKDYFPEPVTVSWNSGALTSGVHTFPAVLQSSGLYSLSSVVTVPSSSLGTQTYICNVNHKPSNTKVDKKVEPKSCDKTHTCPPCPAPEAAGGPSVFLFPPKPKDTLMISRTPEVTCVVVDVSHEDPEVKFNWYVDGVEVHNAKTKPREEQYNSTYRVVSVLTVLHQDWLNGKEYKCKVSNKALAAPIEKTISKAKGQPREPQVCTLPPSRDELTKNQVSLSCAVKGFYPSDIAVEWESNGQPENNYKTTPPVLDSDGSFFLVSKLTVDKSRWQQGNVFSCSVMHEALHNHYTQKSLSLSPG

SEQ ID NO: 239 - protein, 327 aa, synthetic construct
  REGION 1..327: note = Artificial Sequence
DIQMTQSPSSLSASVGDRVTITCHASQNIYVWLNWYQQKPGKAPKLLIYKASNLHTGVPSRFSGSGSGTDFTLTISSLQPEDFATYYCQQGQTYPYTFGGGTKVEIKGPSGLVGDIQLTQSPSSLSASVGDRVTITCRASQSISYLNWYQQKPGKSPKRWIYDTSKLASGVPSRFSGSGSGTDYTLTISSMQPEDAATYYCQQWSSNPLTFGGGTKVEIKRTVAAPSVFIFPPSDEQLKSGTASVVCLLNNFYPREAKVQWKVDNALQSGNSQESVTEQDSKDSTYSLSSTLTLSKADYEKHKVYACEVTHQGLSSPVTKSFNRGEC

SEQ ID NO: 240 - protein, 576 aa, synthetic construct
  REGION 1..576: note = Artificial Sequence
QVQLVQSGAEVKKPGASVKVSCKASGYTFTSYYIHWVRQAPGQGLEWIGSIYPGNVNTNYNEKFKDRATLTVDTSISTAYMELSRLRSDDTAVYFCTRSHYGLDWNFDVWGQGTTVTVSSASTRKAGGQVQLVQSGAEVAKPGASVKVSCKASGYTFTRYTMHWVKQAPGQGLEWIGYINPSRGYTNYAQKFQGKATLTTDKSTSTAYMELSSLRSEDTAVYYCARYYDDHYSLDYWGQGTTLTVSSASTKGPSVFPLAPSSKSTSGGTAALGCLVKDYFPEPVTVSWNSGALTSGVHTFPAVLQSSGLYSLSSVVTVPSSSLGTQTYICNVNHKPSNTKVDKKVEPKSCDKTHTCPPCPAPEAAGGPSVFLFPPKPKDTLMISRTPEVTCVVVDVSHEDPEVKFNWYVDGVEVHNAKTKPREEQYNSTYRVVSVLTVLHQDWLNGKEYKCKVSNKALAAPIEKTISKAKGQPREPQVCTLPPSRDELTKNQVSLSCAVKGFYPSDIAVEWESNGQPENNYKTTPPVLDSDGSFFLVSKLTVDKSRWQQGNVFSCSVMHEALHNHYTQKSLSLSPG

SEQ ID NO: 241 - protein, 328 aa, synthetic construct
  REGION 1..328: note = Artificial Sequence
DIQMTQSPSSLSASVGDRVTITCHASQNIYVWLNWYQQKPGKAPKLLIYKASNLHTGVPSRFSGSGSGTDFTLTISSLQPEDFATYYCQQGQTYPYTFGGGTKVEIKASTRKAGGDIQLTQSPSSLSASVGDRVTITCRASQSISYLNWYQQKPGKSPKRWIYDTSKLASGVPSRFSGSGSGTDYTLTISSMQPEDAATYYCQQWSSNPLTFGGGTKVEIKRTVAAPSVFIFPPSDEQLKSGTASVVCLLNNFYPREAKVQWKVDNALQSGNSQESVTEQDSKDSTYSLSSTLTLSKADYEKHKVYACEVTHQGLSSPVTKSFNRGEC

SEQ ID NO: 242 - protein, 576 aa, synthetic construct
  REGION 1..576: note = Artificial Sequence
QVQLVQSGAEVKKPGASVKVSCKASGYTFTSYYIHWVRQAPGQGLEWIGSIYPGNVNTNYNEKFKDRATLTVDTSISTAYMELSRLRSDDTAVYFCTRSHYGLDWNFDVWGQGTTVTVSSGLVGRKAGQVQLVQSGAEVAKPGASVKVSCKASGYTFTRYTMHWVKQAPGQGLEWIGYINPSRGYTNYAQKFQGKATLTTDKSTSTAYMELSSLRSEDTAVYYCARYYDDHYSLDYWGQGTTLTVSSASTKGPSVFPLAPSSKSTSGGTAALGCLVKDYFPEPVTVSWNSGALTSGVHTFPAVLQSSGLYSLSSVVTVPSSSLGTQTYICNVNHKPSNTKVDKKVEPKSCDKTHTCPPCPAPEAAGGPSVFLFPPKPKDTLMISRTPEVTCVVVDVSHEDPEVKFNWYVDGVEVHNAKTKPREEQYNSTYRVVSVLTVLHQDWLNGKEYKCKVSNKALAAPIEKTISKAKGQPREPQVCTLPPSRDELTKNQVSLSCAVKGFYPSDIAVEWESNGQPENNYKTTPPVLDSDGSFFLVSKLTVDKSRWQQGNVFSCSVMHEALHNHYTQKSLSLSPG

SEQ ID NO: 243 - protein, 328 aa, synthetic construct
  REGION 1..328: note = Artificial Sequence
DIQMTQSPSSLSASVGDRVTITCHASQNIYVWLNWYQQKPGKAPKLLIYKASNLHTGVPSRFSGSGSGTDFTLTISSLQPEDFATYYCQQGQTYPYTFGGGTKVEIKGLVGRKAGDIQLTQSPSSLSASVGDRVTITCRASQSISYLNWYQQKPGKSPKRWIYDTSKLASGVPSRFSGSGSGTDYTLTISSMQPEDAATYYCQQWSSNPLTFGGGTKVEIKRTVAAPSVFIFPPSDEQLKSGTASVVCLLNNFYPREAKVQWKVDNALQSGNSQESVTEQDSKDSTYSLSSTLTLSKADYEKHKVYACEVTHQGLSSPVTKSFNRGEC

SEQ ID NO: 244 - protein, 718 aa, synthetic construct
  REGION 1..718: note = Artificial Sequence
DIVMTQSPDSLAVSLGERATINCKSSQSLLYTSSQKNYLAWYQQKPGQPPKLLIYWASTRESGVPDRFSGSGSGTDFTLTISSLQAEDVAVYYCQQYYAYPWTFGGGTKLEIKGGSSGDIQMTQSPSSLSASVGDRVTITCQASQDINKYLAWYQKKPGKAPKLLIHYTSNLQTGVPSRFSGSGSGTDFTFTISSLQPEDIATYYCLQYDDLFTFGQGTKLEIKGGGGSGGSGSGGGGSASGSGQVQLVQSGAEVKKPGASVKVSCKASGSSFTGYTMNWVKQAPGQGLEWIGIINPYQGDTTYNQKFQGKVTITVDKSTSTVYMELSSLRSEDTAVYYCARGAGLYYFDYWGQGTTVTVSSGGSSGQVQLVQSGAEVVKPGASVKLSCKASGYTFTSYWLHWVRQAPGQGLEWVGMIDPSNSDTRFNPNFKDRVTITADTSTSTAYMELSSLRSEDTAVYYCATYKSYVSPLDYWGQGTSVTVSSASGGSGDKTHTCPPCPAPEAAGGPSVFLFPPKPKDTLMISRTPEVTCVVVDVSHEDPEVKFNWYVDGVEVHNAKTKPREEQYNSTYRVVSVLTVLHQDWLNGKEYKCKVSNKALAAPIEKTISKAKGQPREPQVYTLPPCRDELTKNQVSLWCLVKGFYPSDIAVEWESNGQPENNYKTTPPVLDSDGSFFLYSKLTVDKSRWQQGNVFSCSVMHEALHNHYTQKSLSLSPG

SEQ ID NO: 245 - protein, 718 aa, synthetic construct
  REGION 1..718: note = Artificial Sequence
DIQMTQSPSSLSASVGDRVTITCQASQDINKYLAWYQKKPGKAPKLLIHYTSNLQTGVPSRFSGSGSGTDFTFTISSLQPEDIATYYCLQYDDLFTFGQGTKLEIKGGSSGDIVMTQSPDSLAVSLGERATINCKSSQSLLYTSSQKNYLAWYQQKPGQPPKLLIYWASTRESGVPDRFSGSGSGTDFTLTISSLQAEDVAVYYCQQYYAYPWTFGGGTKLEIKGGGGSGGSGSGGGGSASGSGQVQLVQSGAEVVKPGASVKLSCKASGYTFTSYWLHWVRQAPGQGLEWVGMIDPSNSDTRFNPNFKDRVTITADTSTSTAYMELSSLRSEDTAVYYCATYKSYVSPLDYWGQGTSVTVSSGGSSGQVQLVQSGAEVKKPGASVKVSCKASGSSFTGYTMNWVKQAPGQGLEWIGIINPYQGDTTYNQKFQGKVTITVDKSTSTVYMELSSLRSEDTAVYYCARGAGLYYFDYWGQGTTVTVSSASGGSGDKTHTCPPCPAPEAAGGPSVFLFPPKPKDTLMISRTPEVTCVVVDVSHEDPEVKFNWYVDGVEVHNAKTKPREEQYNSTYRVVSVLTVLHQDWLNGKEYKCKVSNKALAAPIEKTISKAKGQPREPQVYTLPPCRDELTKNQVSLWCLVKGFYPSDIAVEWESNGQPENNYKTTPPVLDSDGSFFLYSKLTVDKSRWQQGNVFSCSVMHEALHNHYTQKSLSLSPG

SEQ ID NO: 246 - protein, 328 aa, synthetic construct
  REGION 1..328: note = Artificial Sequence
DIQMTQSPSSLSASVGDRVTITCHASQNIYVWLNWYQQKPGKAPKLLIYKASNLHTGVPSRFSGSGSGTDFTLTISSLQPEDFATYYCQQGQTYPYTFGCGTKVEIKGPAGLVSGDIQLTQSPSSLSASVGDRVTITCRASQSISYLNWYQQKPGKSPKRWIYDTSKLASGVPSRFSGSGSGTDYTLTISSMQPEDAATYYCQQWSSNPLTFGGGTKVEIKRTVAAPSVFIFPPSDEQLKSGTASVVCLLNNFYPREAKVQWKVDNALQSGNSQESVTEQDSKDSTYSLSSTLTLSKADYEKHKVYACEVTHQGLSSPVTKSFNRGEC

SEQ ID NO: 247 - protein, 576 aa, synthetic construct
  REGION 1..576: note = Artificial Sequence
QVQLVQSGAEVKKPGASVKVSCKASGYTFTSYYIHWVRQAPGQCLEWIGSIYPGNVNTNYNEKFKDRATLTVDTSISTAYMELSRLRSDDTAVYFCTRSHYGLDWNFDVWGQGTTVTVSSGPAGLVSGQVQLVQSGAEVAKPGASVKVSCKASGYTFTRYTMHWVKQAPGQGLEWIGYINPSRGYTNYAQKFQGKATLTTDKSTSTAYMELSSLRSEDTAVYYCARYYDDHYSLDYWGQGTTLTVSSASTKGPSVFPLAPSSKSTSGGTAALGCLVKDYFPEPVTVSWNSGALTSGVHTFPAVLQSSGLYSLSSVVTVPSSSLGTQTYICNVNHKPSNTKVDKKVEPKSCDKTHTCPPCPAPEAAGGPSVFLFPPKPKDTLMISRTPEVTCVVVDVSHEDPEVKFNWYVDGVEVHNAKTKPREEQYNSTYRVVSVLTVLHQDWLNGKEYKCKVSNKALAAPIEKTISKAKGQPREPQVCTLPPSRDELTKNQVSLSCAVKGFYPSDIAVEWESNGQPENNYKTTPPVLDSDGSFFLVSKLTVDKSRWQQGNVFSCSVMHEALHNHYTQKSLSLSPG

SEQ ID NO: 248 - protein, 573 aa, synthetic construct
  REGION 1..573: note = Artificial Sequence
QVQLVQSGAEVKKPGASVKVSCKASGYTFTSYYIHWVRQAPGQCLEWIGSIYPGNVNTNYNEKFKDRATLTVDTSISTAYMELSRLRSDDTAVYFCTRSHYGLDWNFDVWGQGTTVTVSSGGSGSQVQLVQSGAEVAKPGASVKVSCKASGYTFTRYTMHWVKQAPGQGLEWIGYINPSRGYTNYAQKFQGKATLTTDKSTSTAYMELSSLRSEDTAVYYCARYYDDHYSLDYWGQGTTLTVSSASTKGPSVFPLAPSSKSTSGGTAALGCLVKDYFPEPVTVSWNSGALTSGVHTFPAVLQSSGLYSLSSVVTVPSSSLGTQTYICNVNHKPSNTKVDKKVEPKSCDKTHTCPPCPAPEAAGGPSVFLFPPKPKDTLMISRTPEVTCVVVDVSHEDPEVKFNWYVDGVEVHNAKTKPREEQYNSTYRVVSVLTVLHQDWLNGKEYKCKVSNKALAAPIEKTISKAKGQPREPQVCTLPPSRDELTKNQVSLSCAVKGFYPSDIAVEWESNGQPENNYKTTPPVLDSDGSFFLVSKLTVDKSRWQQGNVFSCSVMHEALHNHYTQKSLSLSPG

SEQ ID NO: 249 - protein, 325 aa, synthetic construct
  REGION 1..325: note = Artificial Sequence
DIQMTQSPSSLSASVGDRVTITCHASQNIYVWLNWYQQKPGKAPKLLIYKASNLHTGVPSRFSGSGSGTDFTLTISSLQPEDFATYYCQQGQTYPYTFGCGTKVEIKGGSGSDIQLTQSPSSLSASVGDRVTITCRASQSISYLNWYQQKPGKSPKRWIYDTSKLASGVPSRFSGSGSGTDYTLTISSMQPEDAATYYCQQWSSNPLTFGGGTKVEIKRTVAAPSVFIFPPSDEQLKSGTASVVCLLNNFYPREAKVQWKVDNALQSGNSQESVTEQDSKDSTYSLSSTLTLSKADYEKHKVYACEVTHQGLSSPVTKSFNRGEC

SEQ ID NO: 250 - protein, 328 aa, synthetic construct
  REGION 1..328: note = Artificial Sequence
DIQMTQSPSSLSASVGDRVTITCHASQNIYVWLNWYQQKPGKAPKLLIYKASNLHTGVPSRFSGSGSGTDFTLTISSLQPEDFATYYCQQGQTYPYTFGCGTKVEIKASTRKAGGDIQLTQSPSSLSASVGDRVTITCRASQSISYLNWYQQKPGKSPKRWIYDTSKLASGVPSRFSGSGSGTDYTLTISSMQPEDAATYYCQQWSSNPLTFGGGTKVEIKRTVAAPSVFIFPPSDEQLKSGTASVVCLLNNFYPREAKVQWKVDNALQSGNSQESVTEQDSKDSTYSLSSTLTLSKADYEKHKVYACEVTHQGLSSPVTKSFNRGEC

SEQ ID NO: 251 - protein, 327 aa, synthetic construct
  REGION 1..327: note = Artificial Sequence
DIQMTQSPSSLSASVGDRVTITCHASQNIYVWLNWYQQKPGKAPKLLIYKASNLHTGVPSRFSGSGSGTDFTLTISSLQPEDFATYYCQQGQTYPYTFGCGTKVEIKASTRKAGDIQLTQSPSSLSASVGDRVTITCRASQSISYLNWYQQKPGKSPKRWIYDTSKLASGVPSRFSGSGSGTDYTLTISSMQPEDAATYYCQQWSSNPLTFGGGTKVEIKRTVAAPSVFIFPPSDEQLKSGTASVVCLLNNFYPREAKVQWKVDNALQSGNSQESVTEQDSKDSTYSLSSTLTLSKADYEKHKVYACEVTHQGLSSPVTKSFNRGEC

SEQ ID NO: 252 - protein, 327 aa, synthetic construct
  REGION 1..327: note = Artificial Sequence
DIQMTQSPSSLSASVGDRVTITCHASQNIYVWLNWYQQKPGKAPKLLIYKASNLHTGVPSRFSGSGSGTDFTLTISSLQPEDFATYYCQQGQTYPYTFGCGTKVEIKSTRKAGGDIQLTQSPSSLSASVGDRVTITCRASQSISYLNWYQQKPGKSPKRWIYDTSKLASGVPSRFSGSGSGTDYTLTISSMQPEDAATYYCQQWSSNPLTFGGGTKVEIKRTVAAPSVFIFPPSDEQLKSGTASVVCLLNNFYPREAKVQWKVDNALQSGNSQESVTEQDSKDSTYSLSSTLTLSKADYEKHKVYACEVTHQGLSSPVTKSFNRGEC

SEQ ID NO: 253 - protein, 576 aa, synthetic construct
  REGION 1..576: note = Artificial Sequence
QVQLVQSGAEVKKPGASVKVSCKASGYTFTSYYIHWVRQAPGQCLEWIGSIYPGNVNTNYNEKFKDRATLTVDTSISTAYMELSRLRSDDTAVYFCTRSHYGLDWNFDVWGQGTTVTVSSASTRKAGGQVQLVQSGAEVAKPGASVKVSCKASGYTFTRYTMHWVKQAPGQGLEWIGYINPSRGYTNYAQKFQGKATLTTDKSTSTAYMELSSLRSEDTAVYYCARYYDDHYSLDYWGQGTTLTVSSASTKGPSVFPLAPSSKSTSGGTAALGCLVKDYFPEPVTVSWNSGALTSGVHTFPAVLQSSGLYSLSSVVTVPSSSLGTQTYICNVNHKPSNTKVDKKVEPKSCDKTHTCPPCPAPEAAGGPSVFLFPPKPKDTLMISRTPEVTCVVVDVSHEDPEVKFNWYVDGVEVHNAKTKPREEQYNSTYRVVSVLTVLHQDWLNGKEYKCKVSNKALAAPIEKTISKAKGQPREPQVCTLPPSRDELTKNQVSLSCAVKGFYPSDIAVEWESNGQPENNYKTTPPVLDSDGSFFLVSKLTVDKSRWQQGNVFSCSVMHEALHNHYTQKSLSLSPG

SEQ ID NO: 254 - protein, 575 aa, synthetic construct
  REGION 1..575: note = Artificial Sequence
QVQLVQSGAEVKKPGASVKVSCKASGYTFTSYYIHWVRQAPGQCLEWIGSIYPGNVNTNYNEKFKDRATLTVDTSISTAYMELSRLRSDDTAVYFCTRSHYGLDWNFDVWGQGTTVTVSSASTRKAGQVQLVQSGAEVAKPGASVKVSCKASGYTFTRYTMHWVKQAPGQGLEWIGYINPSRGYTNYAQKFQGKATLTTDKSTSTAYMELSSLRSEDTAVYYCARYYDDHYSLDYWGQGTTLTVSSASTKGPSVFPLAPSSKSTSGGTAALGCLVKDYFPEPVTVSWNSGALTSGVHTFPAVLQSSGLYSLSSVVTVPSSSLGTQTYICNVNHKPSNTKVDKKVEPKSCDKTHTCPPCPAPEAAGGPSVFLFPPKPKDTLMISRTPEVTCVVVDVSHEDPEVKFNWYVDGVEVHNAKTKPREEQYNSTYRVVSVLTVLHQDWLNGKEYKCKVSNKALAAPIEKTISKAKGQPREPQVCTLPPSRDELTKNQVSLSCAVKGFYPSDIAVEWESNGQPENNYKTTPPVLDSDGSFFLVSKLTVDKSRWQQGNVFSCSVMHEALHNHYTQKSLSLSPG

SEQ ID NO: 255 - protein, 575 aa, synthetic construct
  REGION 1..575: note = Artificial Sequence
QVQLVQSGAEVKKPGASVKVSCKASGYTFTSYYIHWVRQAPGQCLEWIGSIYPGNVNTNYNEKFKDRATLTVDTSISTAYMELSRLRSDDTAVYFCTRSHYGLDWNFDVWGQGTTVTVSSSTRKAGGQVQLVQSGAEVAKPGASVKVSCKASGYTFTRYTMHWVKQAPGQGLEWIGYINPSRGYTNYAQKFQGKATLTTDKSTSTAYMELSSLRSEDTAVYYCARYYDDHYSLDYWGQGTTLTVSSASTKGPSVFPLAPSSKSTSGGTAALGCLVKDYFPEPVTVSWNSGALTSGVHTFPAVLQSSGLYSLSSVVTVPSSSLGTQTYICNVNHKPSNTKVDKKVEPKSCDKTHTCPPCPAPEAAGGPSVFLFPPKPKDTLMISRTPEVTCVVVDVSHEDPEVKFNWYVDGVEVHNAKTKPREEQYNSTYRVVSVLTVLHQDWLNGKEYKCKVSNKALAAPIEKTISKAKGQPREPQVCTLPPSRDELTKNQVSLSCAVKGFYPSDIAVEWESNGQPENNYKTTPPVLDSDGSFFLVSKLTVDKSRWQQGNVFSCSVMHEALHNHYTQKSLSLSPG

SEQ ID NO: 256 - protein, 720 aa, synthetic construct
  REGION 1..720: note = Artificial Sequence
EIVLTQSPATLSLSPGERATLSCRASQSVDSYGNSFLHWYQQKPGQAPRLLIYWASNRATGIPARFSGSGSGTDFTLTISSLEPEDFAVYYCQQNNEDLWTFGGGTKLEIKGGSSGDIQMTQSPSSLSASVGDRVTITCHASQNIYVWLNWYQQKPGKAPKLLIYKASNLHTGVPSRFSGSGSGTDFTLTISSLQPEDFATYYCQQGQTYPYTFGGGTKVEIKGGGGSGGSGSGGGGSASGSGQVQLVQSGAEVKKPGASVKVSCKASGYTFTSYYIHWVRQAPGQGLEWIGSIYPGNVNTNYNEKFKDRATLTVDTSISTAYMELSRLRSDDTAVYFCTRSHYGLDWNFDVWGQGTTVTVSSGGSSGEVQLVESGGGLVKPGGSLRLSCAASGFTFQNYAMSWVRQAPGKGLEWVSSISSDATYTYYADSVKGRFTISRDNAKNVLYLQMTSLRAEDTAVYYCARHPPSYYYAFDYWGQGTTLTVSSASGGSGDKTHTCPPCPAPEAAGGPSVFLFPPKPKDTLMISRTPEVTCVVVDVSHEDPEVKFNWYVDGVEVHNAKTKPREEQYNSTYRVVSVLTVLHQDWLNGKEYKCKVSNKALAAPIEKTISKAKGQPREPQVYTLPPCRDELTKNQVSLWCLVKGFYPSDIAVEWESNGQPENNYKTTPPVLDSDGSFFLYSKLTVDKSRWQQGNVFSCSVMHEALHNHYTQKSLSLSPG

SEQ ID NO: 257 - protein, 572 aa, synthetic construct
  REGION 1..572: note = Artificial Sequence
QVQLVQSGAEVVKPGASVKLSCKASGYTFTSYWLHWVRQAPGQGLEWVGMIDPSNSDTRFNPNFKDRVTITADTSTSTAYMELSSLRSEDTAVYYCATYKSYVSPLDYWGQGTSVTVSSGGSGSQVQLVQSGAEVAKPGASVKVSCKASGYTFTRYTMHWVKQAPGQGLEWIGYINPSRGYTNYAQKFQGKATLTTDKSTSTAYMELSSLRSEDTAVYYCARYYDDHYSLDYWGQGTTLTVSSASTKGPSVFPLAPSSKSTSGGTAALGCLVKDYFPEPVTVSWNSGALTSGVHTFPAVLQSSGLYSLSSVVTVPSSSLGTQTYICNVNHKPSNTKVDKKVEPKSCDKTHTCPPCPAPEAAGGPSVFLFPPKPKDTLMISRTPEVTCVVVDVSHEDPEVKFNWYVDGVEVHNAKTKPREEQYNSTYRVVSVLTVLHQDWLNGKEYKCKVSNKALAAPIEKTISKAKGQPREPQVCTLPPSRDELTKNQVSLSCAVKGFYPSDIAVEWESNGQPENNYKTTPPVLDSDGSFFLVSKLTVDKSRWQQGNVFSCSVMHEALHNHYTQKSLSLSPG

SEQ ID NO: 258 - protein, 331 aa, synthetic construct
  REGION 1..331: note = Artificial Sequence
DIVMTQSPDSLAVSLGERATINCKSSQSLLYTSSQKNYLAWYQQKPGQPPKLLIYWASTRESGVPDRFSGSGSGTDFTLTISSLQAEDVAVYYCQQYYAYPWTFGGGTKLEIKGGSGSDIQLTQSPSSLSASVGDRVTITCRASQSISYLNWYQQKPGKSPKRWIYDTSKLASGVPSRFSGSGSGTDYTLTISSMQPEDAATYYCQQWSSNPLTFGGGTKVEIKRTVAAPSVFIFPPSDEQLKSGTASVVCLLNNFYPREAKVQWKVDNALQSGNSQESVTEQDSKDSTYSLSSTLTLSKADYEKHKVYACEVTHQGLSSPVTKSFNRGEC

SEQ ID NO: 259 - protein, 575 aa, synthetic construct
  REGION 1..575: note = Artificial Sequence
QVQLVQSGAEVVKPGASVKLSCKASGYTFTSYWLHWVRQAPGQGLEWVGMIDPSNSDTRFNPNFKDRVTITADTSTSTAYMELSSLRSEDTAVYYCATYKSYVSPLDYWGQGTSVTVSSGPAGLVSGQVQLVQSGAEVAKPGASVKVSCKASGYTFTRYTMHWVKQAPGQGLEWIGYINPSRGYTNYAQKFQGKATLTTDKSTSTAYMELSSLRSEDTAVYYCARYYDDHYSLDYWGQGTTLTVSSASTKGPSVFPLAPSSKSTSGGTAALGCLVKDYFPEPVTVSWNSGALTSGVHTFPAVLQSSGLYSLSSVVTVPSSSLGTQTYICNVNHKPSNTKVDKKVEPKSCDKTHTCPPCPAPEAAGGPSVFLFPPKPKDTLMISRTPEVTCVVVDVSHEDPEVKFNWYVDGVEVHNAKTKPREEQYNSTYRVVSVLTVLHQDWLNGKEYKCKVSNKALAAPIEKTISKAKGQPREPQVCTLPPSRDELTKNQVSLSCAVKGFYPSDIAVEWESNGQPENNYKTTPPVLDSDGSFFLVSKLTVDKSRWQQGNVFSCSVMHEALHNHYTQKSLSLSPG

SEQ ID NO: 260 - protein, 334 aa, synthetic construct
  REGION 1..334: note = Artificial Sequence
DIVMTQSPDSLAVSLGERATINCKSSQSLLYTSSQKNYLAWYQQKPGQPPKLLIYWASTRESGVPDRFSGSGSGTDFTLTISSLQAEDVAVYYCQQYYAYPWTFGGGTKLEIKGPAGLVSGDIQLTQSPSSLSASVGDRVTITCRASQSISYLNWYQQKPGKSPKRWIYDTSKLASGVPSRFSGSGSGTDYTLTISSMQPEDAATYYCQQWSSNPLTFGGGTKVEIKRTVAAPSVFIFPPSDEQLKSGTASVVCLLNNFYPREAKVQWKVDNALQSGNSQESVTEQDSKDSTYSLSSTLTLSKADYEKHKVYACEVTHQGLSSPVTKSFNRGEC

SEQ ID NO: 261 - protein, 575 aa, synthetic construct
  REGION 1..575: note = Artificial Sequence
QVQLVQSGAEVVKPGASVKLSCKASGYTFTSYWLHWVRQAPGQGLEWVGMIDPSNSDTRFNPNFKDRVTITADTSTSTAYMELSSLRSEDTAVYYCATYKSYVSPLDYWGQGTSVTVSSASTRKAGGQVQLVQSGAEVAKPGASVKVSCKASGYTFTRYTMHWVKQAPGQGLEWIGYINPSRGYTNYAQKFQGKATLTTDKSTSTAYMELSSLRSEDTAVYYCARYYDDHYSLDYWGQGTTLTVSSASTKGPSVFPLAPSSKSTSGGTAALGCLVKDYFPEPVTVSWNSGALTSGVHTFPAVLQSSGLYSLSSVVTVPSSSLGTQTYICNVNHKPSNTKVDKKVEPKSCDKTHTCPPCPAPEAAGGPSVFLFPPKPKDTLMISRTPEVTCVVVDVSHEDPEVKFNWYVDGVEVHNAKTKPREEQYNSTYRVVSVLTVLHQDWLNGKEYKCKVSNKALAAPIEKTISKAKGQPREPQVCTLPPSRDELTKNQVSLSCAVKGFYPSDIAVEWESNGQPENNYKTTPPVLDSDGSFFLVSKLTVDKSRWQQGNVFSCSVMHEALHNHYTQKSLSLSPG

SEQ ID NO: 262 - protein, 574 aa, synthetic construct
  REGION 1..574: note = Artificial Sequence
QVQLVQSGAEVVKPGASVKLSCKASGYTFTSYWLHWVRQAPGQGLEWVGMIDPSNSDTRFNPNFKDRVTITADTSTSTAYMELSSLRSEDTAVYYCATYKSYVSPLDYWGQGTSVTVSSASTRKAGQVQLVQSGAEVAKPGASVKVSCKASGYTFTRYTMHWVKQAPGQGLEWIGYINPSRGYTNYAQKFQGKATLTTDKSTSTAYMELSSLRSEDTAVYYCARYYDDHYSLDYWGQGTTLTVSSASTKGPSVFPLAPSSKSTSGGTAALGCLVKDYFPEPVTVSWNSGALTSGVHTFPAVLQSSGLYSLSSVVTVPSSSLGTQTYICNVNHKPSNTKVDKKVEPKSCDKTHTCPPCPAPEAAGGPSVFLFPPKPKDTLMISRTPEVTCVVVDVSHEDPEVKFNWYVDGVEVHNAKTKPREEQYNSTYRVVSVLTVLHQDWLNGKEYKCKVSNKALAAPIEKTISKAKGQPREPQVCTLPPSRDELTKNQVSLSCAVKGFYPSDIAVEWESNGQPENNYKTTPPVLDSDGSFFLVSKLTVDKSRWQQGNVFSCSVMHEALHNHYTQKSLSLSPG

SEQ ID NO: 263 - protein, 574 aa, synthetic construct
  REGION 1..574: note = Artificial Sequence
QVQLVQSGAEVVKPGASVKLSCKASGYTFTSYWLHWVRQAPGQGLEWVGMIDPSNSDTRFNPNFKDRVTITADTSTSTAYMELSSLRSEDTAVYYCATYKSYVSPLDYWGQGTSVTVSSSTRKAGGQVQLVQSGAEVAKPGASVKVSCKASGYTFTRYTMHWVKQAPGQGLEWIGYINPSRGYTNYAQKFQGKATLTTDKSTSTAYMELSSLRSEDTAVYYCARYYDDHYSLDYWGQGTTLTVSSASTKGPSVFPLAPSSKSTSGGTAALGCLVKDYFPEPVTVSWNSGALTSGVHTFPAVLQSSGLYSLSSVVTVPSSSLGTQTYICNVNHKPSNTKVDKKVEPKSCDKTHTCPPCPAPEAAGGPSVFLFPPKPKDTLMISRTPEVTCVVVDVSHEDPEVKFNWYVDGVEVHNAKTKPREEQYNSTYRVVSVLTVLHQDWLNGKEYKCKVSNKALAAPIEKTISKAKGQPREPQVCTLPPSRDELTKNQVSLSCAVKGFYPSDIAVEWESNGQPENNYKTTPPVLDSDGSFFLVSKLTVDKSRWQQGNVFSCSVMHEALHNHYTQKSLSLSPG

SEQ ID NO: 264 - protein, 334 aa, synthetic construct
  REGION 1..334: note = Artificial Sequence
DIVMTQSPDSLAVSLGERATINCKSSQSLLYTSSQKNYLAWYQQKPGQPPKLLIYWASTRESGVPDRFSGSGSGTDFTLTISSLQAEDVAVYYCQQYYAYPWTFGGGTKLEIKASTRKAGGDIQLTQSPSSLSASVGDRVTITCRASQSISYLNWYQQKPGKSPKRWIYDTSKLASGVPSRFSGSGSGTDYTLTISSMQPEDAATYYCQQWSSNPLTFGGGTKVEIKRTVAAPSVFIFPPSDEQLKSGTASVVCLLNNFYPREAKVQWKVDNALQSGNSQESVTEQDSKDSTYSLSSTLTLSKADYEKHKVYACEVTHQGLSSPVTKSFNRGEC

SEQ ID NO: 265 - protein, 333 aa, synthetic construct
  REGION 1..333: note = Artificial Sequence
DIVMTQSPDSLAVSLGERATINCKSSQSLLYTSSQKNYLAWYQQKPGQPPKLLIYWASTRESGVPDRFSGSGSGTDFTLTISSLQAEDVAVYYCQQYYAYPWTFGGGTKLEIKASTRKAGDIQLTQSPSSLSASVGDRVTITCRASQSISYLNWYQQKPGKSPKRWIYDTSKLASGVPSRFSGSGSGTDYTLTISSMQPEDAATYYCQQWSSNPLTFGGGTKVEIKRTVAAPSVFIFPPSDEQLKSGTASVVCLLNNFYPREAKVQWKVDNALQSGNSQESVTEQDSKDSTYSLSSTLTLSKADYEKHKVYACEVTHQGLSSPVTKSFNRGEC

SEQ ID NO: 266 - protein, 333 aa, synthetic construct
  REGION 1..333: note = Artificial Sequence
DIVMTQSPDSLAVSLGERATINCKSSQSLLYTSSQKNYLAWYQQKPGQPPKLLIYWASTRESGVPDRFSGSGSGTDFTLTISSLQAEDVAVYYCQQYYAYPWTFGGGTKLEIKSTRKAGGDIQLTQSPSSLSASVGDRVTITCRASQSISYLNWYQQKPGKSPKRWIYDTSKLASGVPSRFSGSGSGTDYTLTISSMQPEDAATYYCQQWSSNPLTFGGGTKVEIKRTVAAPSVFIFPPSDEQLKSGTASVVCLLNNFYPREAKVQWKVDNALQSGNSQESVTEQDSKDSTYSLSSTLTLSKADYEKHKVYACEVTHQGLSSPVTKSFNRGEC

SEQ ID NO: 267 - protein, 721 aa, synthetic construct
  REGION 1..721: note = Artificial Sequence
DIVMTQSPDSLAVSLGERATINCKSSQSLLYTSSQKNYLAWYQQKPGQPPKLLIYWASTRESGVPDRFSGSGSGTDFTLTISSLQAEDVAVYYCQQYYAYPWTFGGGTKLEIKGGSSGDIQMTQSPSSLSASVGDRVTITCHASQNIYVWLNWYQQKPGKAPKLLIYKASNLHTGVPSRFSGSGSGTDFTLTISSLQPEDFATYYCQQGQTYPYTFGGGTKVEIKGGGGSGGSGSGGGGSASGSGQVQLVQSGAEVKKPGASVKVSCKASGYTFTSYYIHWVRQAPGQGLEWIGSIYPGNVNTNYNEKFKDRATLTVDTSISTAYMELSRLRSDDTAVYFCTRSHYGLDWNFDVWGQGTTVTVSSGGSSGQVQLVQSGAEVVKPGASVKLSCKASGYTFTSYWLHWVRQAPGQGLEWVGMIDPSNSDTRFNPNFKDRVTITADTSTSTAYMELSSLRSEDTAVYYCATYKSYVSPLDYWGQGTSVTVSSASGGSGDKTHTCPPCPAPEAAGGPSVFLFPPKPKDTLMISRTPEVTCVVVDVSHEDPEVKFNWYVDGVEVHNAKTKPREEQYNSTYRVVSVLTVLHQDWLNGKEYKCKVSNKALAAPIEKTISKAKGQPREPQVYTLPPCRDELTKNQVSLWCLVKGFYPSDIAVEWESNGQPENNYKTTPPVLDSDGSFFLYSKLTVDKSRWQQGNVFSCSVMHEALHNHYTQKSLSLSPG

SEQ ID NO: 268 - protein, 573 aa, synthetic construct
  REGION 1..573: note = Artificial Sequence
EVQLVESGGGLVKPGGSLRLSCAASGFTFQNYAMSWVRQAPGKGLEWVSSISSDATYTYYADSVKGRFTISRDNAKNVLYLQMTSLRAEDTAVYYCARHPPSYYYAFDYWGQGTTLTVSSGGSGSQVQLVQSGAEVAKPGASVKVSCKASGYTFTRYTMHWVKQAPGQGLEWIGYINPSRGYTNYAQKFQGKATLTTDKSTSTAYMELSSLRSEDTAVYYCARYYDDHYSLDYWGQGTTLTVSSASTKGPSVFPLAPSSKSTSGGTAALGCLVKDYFPEPVTVSWNSGALTSGVHTFPAVLQSSGLYSLSSVVTVPSSSLGTQTYICNVNHKPSNTKVDKKVEPKSCDKTHTCPPCPAPEAAGGPSVFLFPPKPKDTLMISRTPEVTCVVVDVSHEDPEVKFNWYVDGVEVHNAKTKPREEQYNSTYRVVSVLTVLHQDWLNGKEYKCKVSNKALAAPIEKTISKAKGQPREPQVCTLPPSRDELTKNQVSLSCAVKGFYPSDIAVEWESNGQPENNYKTTPPVLDSDGSFFLVSKLTVDKSRWQQGNVFSCSVMHEALHNHYTQKSLSLSPG

SEQ ID NO: 269 - protein, 222 aa, synthetic construct
  REGION 1..222: note = Artificial Sequence
EIVLTQSPATLSLSPGERATLSCRASQSVDSYGNSFLHWYQQKPGQAPRLLIYWASNRATGIPARFSGSGSGTDFTLTISSLEPEDFAVYYCQQNNEDLWTFGGGTKLEIKGGSGSDIQLTQSPSSLSASVGDRVTITCRASQSISYLNWYQQKPGKSPKRWIYDTSKLASGVPSRFSGSGSGTDYTLTISSMQPEDAATYYCQQWSSNPLTFGGGTKVEIK

SEQ ID NO: 270 - protein, 576 aa, synthetic construct
  REGION 1..576: note = Artificial Sequence
EVQLVESGGGLVKPGGSLRLSCAASGFTFQNYAMSWVRQAPGKGLEWVSSISSDATYTYYADSVKGRFTISRDNAKNVLYLQMTSLRAEDTAVYYCARHPPSYYYAFDYWGQGTTLTVSSGPAGLVSGQVQLVQSGAEVAKPGASVKVSCKASGYTFTRYTMHWVKQAPGQGLEWIGYINPSRGYTNYAQKFQGKATLTTDKSTSTAYMELSSLRSEDTAVYYCARYYDDHYSLDYWGQGTTLTVSSASTKGPSVFPLAPSSKSTSGGTAALGCLVKDYFPEPVTVSWNSGALTSGVHTFPAVLQSSGLYSLSSVVTVPSSSLGTQTYICNVNHKPSNTKVDKKVEPKSCDKTHTCPPCPAPEAAGGPSVFLFPPKPKDTLMISRTPEVTCVVVDVSHEDPEVKFNWYVDGVEVHNAKTKPREEQYNSTYRVVSVLTVLHQDWLNGKEYKCKVSNKALAAPIEKTISKAKGQPREPQVCTLPPSRDELTKNQVSLSCAVKGFYPSDIAVEWESNGQPENNYKTTPPVLDSDGSFFLVSKLTVDKSRWQQGNVFSCSVMHEALHNHYTQKSLSLSPG

SEQ ID NO: 271 - protein, 225 aa, synthetic construct
  REGION 1..225: note = Artificial Sequence
EIVLTQSPATLSLSPGERATLSCRASQSVDSYGNSFLHWYQQKPGQAPRLLIYWASNRATGIPARFSGSGSGTDFTLTISSLEPEDFAVYYCQQNNEDLWTFGGGTKLEIKGPAGLVSGDIQLTQSPSSLSASVGDRVTITCRASQSISYLNWYQQKPGKSPKRWIYDTSKLASGVPSRFSGSGSGTDYTLTISSMQPEDAATYYCQQWSSNPLTFGGGTKVEIK

SEQ ID NO: 272 - protein, 576 aa, synthetic construct
  REGION 1..576: note = Artificial Sequence
EVQLVESGGGLVKPGGSLRLSCAASGFTFQNYAMSWVRQAPGKGLEWVSSISSDATYTYYADSVKGRFTISRDNAKNVLYLQMTSLRAEDTAVYYCARHPPSYYYAFDYWGQGTTLTVSSASTRKAGGQVQLVQSGAEVAKPGASVKVSCKASGYTFTRYTMHWVKQAPGQGLEWIGYINPSRGYTNYAQKFQGKATLTTDKSTSTAYMELSSLRSEDTAVYYCARYYDDHYSLDYWGQGTTLTVSSASTKGPSVFPLAPSSKSTSGGTAALGCLVKDYFPEPVTVSWNSGALTSGVHTFPAVLQSSGLYSLSSVVTVPSSSLGTQTYICNVNHKPSNTKVDKKVEPKSCDKTHTCPPCPAPEAAGGPSVFLFPPKPKDTLMISRTPEVTCVVVDVSHEDPEVKFNWYVDGVEVHNAKTKPREEQYNSTYRVVSVLTVLHQDWLNGKEYKCKVSNKALAAPIEKTISKAKGQPREPQVCTLPPSRDELTKNQVSLSCAVKGFYPSDIAVEWESNGQPENNYKTTPPVLDSDGSFFLVSKLTVDKSRWQQGNVFSCSVMHEALHNHYTQKSLSLSPG

SEQ ID NO: 273 - protein, 575 aa, synthetic construct
  REGION 1..575: note = Artificial Sequence
EVQLVESGGGLVKPGGSLRLSCAASGFTFQNYAMSWVRQAPGKGLEWVSSISSDATYTYYADSVKGRFTISRDNAKNVLYLQMTSLRAEDTAVYYCARHPPSYYYAFDYWGQGTTLTVSSASTRKAGQVQLVQSGAEVAKPGASVKVSCKASGYTFTRYTMHWVKQAPGQGLEWIGYINPSRGYTNYAQKFQGKATLTTDKSTSTAYMELSSLRSEDTAVYYCARYYDDHYSLDYWGQGTTLTVSSASTKGPSVFPLAPSSKSTSGGTAALGCLVKDYFPEPVTVSWNSGALTSGVHTFPAVLQSSGLYSLSSVVTVPSSSLGTQTYICNVNHKPSNTKVDKKVEPKSCDKTHTCPPCPAPEAAGGPSVFLFPPKPKDTLMISRTPEVTCVVVDVSHEDPEVKFNWYVDGVEVHNAKTKPREEQYNSTYRVVSVLTVLHQDWLNGKEYKCKVSNKALAAPIEKTISKAKGQPREPQVCTLPPSRDELTKNQVSLSCAVKGFYPSDIAVEWESNGQPENNYKTTPPVLDSDGSFFLVSKLTVDKSRWQQGNVFSCSVMHEALHNHYTQKSLSLSPG

SEQ ID NO: 274 - protein, 575 aa, synthetic construct
  REGION 1..575: note = Artificial Sequence
EVQLVESGGGLVKPGGSLRLSCAASGFTFQNYAMSWVRQAPGKGLEWVSSISSDATYTYYADSVKGRFTISRDNAKNVLYLQMTSLRAEDTAVYYCARHPPSYYYAFDYWGQGTTLTVSSSTRKAGGQVQLVQSGAEVAKPGASVKVSCKASGYTFTRYTMHWVKQAPGQGLEWIGYINPSRGYTNYAQKFQGKATLTTDKSTSTAYMELSSLRSEDTAVYYCARYYDDHYSLDYWGQGTTLTVSSASTKGPSVFPLAPSSKSTSGGTAALGCLVKDYFPEPVTVSWNSGALTSGVHTFPAVLQSSGLYSLSSVVTVPSSSLGTQTYICNVNHKPSNTKVDKKVEPKSCDKTHTCPPCPAPEAAGGPSVFLFPPKPKDTLMISRTPEVTCVVVDVSHEDPEVKFNWYVDGVEVHNAKTKPREEQYNSTYRVVSVLTVLHQDWLNGKEYKCKVSNKALAAPIEKTISKAKGQPREPQVCTLPPSRDELTKNQVSLSCAVKGFYPSDIAVEWESNGQPENNYKTTPPVLDSDGSFFLVSKLTVDKSRWQQGNVFSCSVMHEALHNHYTQKSLSLSPG

SEQ ID NO: 275 - protein, 225 aa, synthetic construct
  REGION 1..225: note = Artificial Sequence
EIVLTQSPATLSLSPGERATLSCRASQSVDSYGNSFLHWYQQKPGQAPRLLIYWASNRATGIPARFSGSGSGTDFTLTISSLEPEDFAVYYCQQNNEDLWTFGGGTKLEIKASTRKAGGDIQLTQSPSSLSASVGDRVTITCRASQSISYLNWYQQKPGKSPKRWIYDTSKLASGVPSRFSGSGSGTDYTLTISSMQPEDAATYYCQQWSSNPLTFGGGTKVEIK

SEQ ID NO: 276 - protein, 224 aa, synthetic construct
  REGION 1..224: note = Artificial Sequence
EIVLTQSPATLSLSPGERATLSCRASQSVDSYGNSFLHWYQQKPGQAPRLLIYWASNRATGIPARFSGSGSGTDFTLTISSLEPEDFAVYYCQQNNEDLWTFGGGTKLEIKASTRKAGDIQLTQSPSSLSASVGDRVTITCRASQSISYLNWYQQKPGKSPKRWIYDTSKLASGVPSRFSGSGSGTDYTLTISSMQPEDAATYYCQQWSSNPLTFGGGTKVEIK

SEQ ID NO: 277 - protein, 224 aa, synthetic construct
  REGION 1..224: note = Artificial Sequence
EIVLTQSPATLSLSPGERATLSCRASQSVDSYGNSFLHWYQQKPGQAPRLLIYWASNRATGIPARFSGSGSGTDFTLTISSLEPEDFAVYYCQQNNEDLWTFGGGTKLEIKSTRKAGGDIQLTQSPSSLSASVGDRVTITCRASQSISYLNWYQQKPGKSPKRWIYDTSKLASGVPSRFSGSGSGTDYTLTISSMQPEDAATYYCQQWSSNPLTFGGGTKVEIK

SEQ ID NO: 278 - protein, 713 aa, synthetic construct
  REGION 1..713: note = Artificial Sequence
DIQMTQSPSSLSASVGDRVTITCQASQDINKYLAWYQKKPGKAPKLLIHYTSNLQTGVPSRFSGSGSGTDFTFTISSLQPEDIATYYCLQYDDLFTFGQGTKLEIKGGSSGDIQMTQSPSSLSASVGDRVTITCHASQNIYVWLNWYQQKPGKAPKLLIYKASNLHTGVPSRFSGSGSGTDFTLTISSLQPEDFATYYCQQGQTYPYTFGGGTKVEIKGGGGSGGSGSGGGGSASGSGQVQLVQSGAEVKKPGASVKVSCKASGYTFTSYYIHWVRQAPGQGLEWIGSIYPGNVNTNYNEKFKDRATLTVDTSISTAYMELSRLRSDDTAVYFCTRSHYGLDWNFDVWGQGTTVTVSSGGSSGQVQLVQSGAEVKKPGASVKVSCKASGSSFTGYTMNWVKQAPGQGLEWIGIINPYQGDTTYNQKFQGKVTITVDKSTSTVYMELSSLRSEDTAVYYCARGAGLYYFDYWGQGTTVTVSSASGGSGDKTHTCPPCPAPEAAGGPSVFLFPPKPKDTLMISRTPEVTCVVVDVSHEDPEVKFNWYVDGVEVHNAKTKPREEQYNSTYRVVSVLTVLHQDWLNGKEYKCKVSNKALAAPIEKTISKAKGQPREPQVYTLPPCRDELTKNQVSLWCLVKGFYPSDIAVEWESNGQPENNYKTTPPVLDSDGSFFLYSKLTVDKSRWQQGNVFSCSVMHEALHNHYTQKSLSLSPG

SEQ ID NO: 279 - protein, 713 aa, synthetic construct
  REGION 1..713: note = Artificial Sequence
DIQMTQSPSSLSASVGDRVTITCHASQNIYVWLNWYQQKPGKAPKLLIYKASNLHTGVPSRFSGSGSGTDFTLTISSLQPEDFATYYCQQGQTYPYTFGGGTKVEIKGGSSGDIQMTQSPSSLSASVGDRVTITCQASQDINKYLAWYQKKPGKAPKLLIHYTSNLQTGVPSRFSGSGSGTDFTFTISSLQPEDIATYYCLQYDDLFTFGQGTKLEIKGGGGSGGSGSGGGGSASGSGQVQLVQSGAEVKKPGASVKVSCKASGSSFTGYTMNWVKQAPGQGLEWIGIINPYQGDTTYNQKFQGKVTITVDKSTSTVYMELSSLRSEDTAVYYCARGAGLYYFDYWGQGTTVTVSSGGSSGQVQLVQSGAEVKKPGASVKVSCKASGYTFTSYYIHWVRQAPGQGLEWIGSIYPGNVNTNYNEKFKDRATLTVDTSISTAYMELSRLRSDDTAVYFCTRSHYGLDWNFDVWGQGTTVTVSSASGGSGDKTHTCPPCPAPEAAGGPSVFLFPPKPKDTLMISRTPEVTCVVVDVSHEDPEVKFNWYVDGVEVHNAKTKPREEQYNSTYRVVSVLTVLHQDWLNGKEYKCKVSNKALAAPIEKTISKAKGQPREPQVYTLPPCRDELTKNQVSLWCLVKGFYPSDIAVEWESNGQPENNYKTTPPVLDSDGSFFLYSKLTVDKSRWQQGNVFSCSVMHEALHNHYTQKSLSLSPG

SEQ ID NO: 280 - protein, 571 aa, synthetic construct
  REGION 1..571: note = Artificial Sequence
QVQLVQSGAEVKKPGASVKVSCKASGSSFTGYTMNWVKQAPGQGLEWIGIINPYQGDTTYNQKFQGKVTITVDKSTSTVYMELSSLRSEDTAVYYCARGAGLYYFDYWGQGTTVTVSSGGSGSQVQLVQSGAEVAKPGASVKVSCKASGYTFTRYTMHWVKQAPGQGLEWIGYINPSRGYTNYAQKFQGKATLTTDKSTSTAYMELSSLRSEDTAVYYCARYYDDHYSLDYWGQGTTLTVSSASTKGPSVFPLAPSSKSTSGGTAALGCLVKDYFPEPVTVSWNSGALTSGVHTFPAVLQSSGLYSLSSVVTVPSSSLGTQTYICNVNHKPSNTKVDKKVEPKSCDKTHTCPPCPAPEAAGGPSVFLFPPKPKDTLMISRTPEVTCVVVDVSHEDPEVKFNWYVDGVEVHNAKTKPREEQYNSTYRVVSVLTVLHQDWLNGKEYKCKVSNKALAAPIEKTISKAKGQPREPQVCTLPPSRDELTKNQVSLSCAVKGFYPSDIAVEWESNGQPENNYKTTPPVLDSDGSFFLVSKLTVDKSRWQQGNVFSCSVMHEALHNHYTQKSLSLSPG

SEQ ID NO: 281 - protein, 324 aa, synthetic construct
  REGION 1..324: note = Artificial Sequence
DIQMTQSPSSLSASVGDRVTITCQASQDINKYLAWYQKKPGKAPKLLIHYTSNLQTGVPSRFSGSGSGTDFTFTISSLQPEDIATYYCLQYDDLFTFGQGTKLEIKGGSGSDIQLTQSPSSLSASVGDRVTITCRASQSISYLNWYQQKPGKSPKRWIYDTSKLASGVPSRFSGSGSGTDYTLTISSMQPEDAATYYCQQWSSNPLTFGGGTKVEIKRTVAAPSVFIFPPSDEQLKSGTASVVCLLNNFYPREAKVQWKVDNALQSGNSQESVTEQDSKDSTYSLSSTLTLSKADYEKHKVYACEVTHQGLSSPVTKSFNRGEC

SEQ ID NO: 282 - protein, 574 aa, synthetic construct
  REGION 1..574: note = Artificial Sequence
QVQLVQSGAEVKKPGASVKVSCKASGSSFTGYTMNWVKQAPGQGLEWIGIINPYQGDTTYNQKFQGKVTITVDKSTSTVYMELSSLRSEDTAVYYCARGAGLYYFDYWGQGTTVTVSSGPAGLVSGQVQLVQSGAEVAKPGASVKVSCKASGYTFTRYTMHWVKQAPGQGLEWIGYINPSRGYTNYAQKFQGKATLTTDKSTSTAYMELSSLRSEDTAVYYCARYYDDHYSLDYWGQGTTLTVSSASTKGPSVFPLAPSSKSTSGGTAALGCLVKDYFPEPVTVSWNSGALTSGVHTFPAVLQSSGLYSLSSVVTVPSSSLGTQTYICNVNHKPSNTKVDKKVEPKSCDKTHTCPPCPAPEAAGGPSVFLFPPKPKDTLMISRTPEVTCVVVDVSHEDPEVKFNWYVDGVEVHNAKTKPREEQYNSTYRVVSVLTVLHQDWLNGKEYKCKVSNKALAAPIEKTISKAKGQPREPQVCTLPPSRDELTKNQVSLSCAVKGFYPSDIAVEWESNGQPENNYKTTPPVLDSDGSFFLVSKLTVDKSRWQQGNVFSCSVMHEALHNHYTQKSLSLSPG

SEQ ID NO: 283 - protein, 327 aa, synthetic construct
  REGION 1..327: note = Artificial Sequence
DIQMTQSPSSLSASVGDRVTITCQASQDINKYLAWYQKKPGKAPKLLIHYTSNLQTGVPSRFSGSGSGTDFTFTISSLQPEDIATYYCLQYDDLFTFGQGTKLEIKGPAGLVSGDIQLTQSPSSLSASVGDRVTITCRASQSISYLNWYQQKPGKSPKRWIYDTSKLASGVPSRFSGSGSGTDYTLTISSMQPEDAATYYCQQWSSNPLTFGGGTKVEIKRTVAAPSVFIFPPSDEQLKSGTASVVCLLNNFYPREAKVQWKVDNALQSGNSQESVTEQDSKDSTYSLSSTLTLSKADYEKHKVYACEVTHQGLSSPVTKSFNRGEC

SEQ ID NO: 284 - protein, 574 aa, synthetic construct
  REGION 1..574: note = Artificial Sequence
QVQLVQSGAEVKKPGASVKVSCKASGSSFTGYTMNWVKQAPGQGLEWIGIINPYQGDTTYNQKFQGKVTITVDKSTSTVYMELSSLRSEDTAVYYCARGAGLYYFDYWGQGTTVTVSSASTRKAGGQVQLVQSGAEVAKPGASVKVSCKASGYTFTRYTMHWVKQAPGQGLEWIGYINPSRGYTNYAQKFQGKATLTTDKSTSTAYMELSSLRSEDTAVYYCARYYDDHYSLDYWGQGTTLTVSSASTKGPSVFPLAPSSKSTSGGTAALGCLVKDYFPEPVTVSWNSGALTSGVHTFPAVLQSSGLYSLSSVVTVPSSSLGTQTYICNVNHKPSNTKVDKKVEPKSCDKTHTCPPCPAPEAAGGPSVFLFPPKPKDTLMISRTPEVTCVVVDVSHEDPEVKFNWYVDGVEVHNAKTKPREEQYNSTYRVVSVLTVLHQDWLNGKEYKCKVSNKALAAPIEKTISKAKGQPREPQVCTLPPSRDELTKNQVSLSCAVKGFYPSDIAVEWESNGQPENNYKTTPPVLDSDGSFFLVSKLTVDKSRWQQGNVFSCSVMHEALHNHYTQKSLSLSPG

SEQ ID NO: 285 - protein, 573 aa, synthetic construct
  REGION 1..573: note = Artificial Sequence
QVQLVQSGAEVKKPGASVKVSCKASGSSFTGYTMNWVKQAPGQGLEWIGIINPYQGDTTYNQKFQGKVTITVDKSTSTVYMELSSLRSEDTAVYYCARGAGLYYFDYWGQGTTVTVSSASTRKAGQVQLVQSGAEVAKPGASVKVSCKASGYTFTRYTMHWVKQAPGQGLEWIGYINPSRGYTNYAQKFQGKATLTTDKSTSTAYMELSSLRSEDTAVYYCARYYDDHYSLDYWGQGTTLTVSSASTKGPSVFPLAPSSKSTSGGTAALGCLVKDYFPEPVTVSWNSGALTSGVHTFPAVLQSSGLYSLSSVVTVPSSSLGTQTYICNVNHKPSNTKVDKKVEPKSCDKTHTCPPCPAPEAAGGPSVFLFPPKPKDTLMISRTPEVTCVVVDVSHEDPEVKFNWYVDGVEVHNAKTKPREEQYNSTYRVVSVLTVLHQDWLNGKEYKCKVSNKALAAPIEKTISKAKGQPREPQVCTLPPSRDELTKNQVSLSCAVKGFYPSDIAVEWESNGQPENNYKTTPPVLDSDGSFFLVSKLTVDKSRWQQGNVFSCSVMHEALHNHYTQKSLSLSPG

SEQ ID NO: 286 - protein, 573 aa, synthetic construct
  REGION 1..573: note = Artificial Sequence
QVQLVQSGAEVKKPGASVKVSCKASGSSFTGYTMNWVKQAPGQGLEWIGIINPYQGDTTYNQKFQGKVTITVDKSTSTVYMELSSLRSEDTAVYYCARGAGLYYFDYWGQGTTVTVSSSTRKAGGQVQLVQSGAEVAKPGASVKVSCKASGYTFTRYTMHWVKQAPGQGLEWIGYINPSRGYTNYAQKFQGKATLTTDKSTSTAYMELSSLRSEDTAVYYCARYYDDHYSLDYWGQGTTLTVSSASTKGPSVFPLAPSSKSTSGGTAALGCLVKDYFPEPVTVSWNSGALTSGVHTFPAVLQSSGLYSLSSVVTVPSSSLGTQTYICNVNHKPSNTKVDKKVEPKSCDKTHTCPPCPAPEAAGGPSVFLFPPKPKDTLMISRTPEVTCVVVDVSHEDPEVKFNWYVDGVEVHNAKTKPREEQYNSTYRVVSVLTVLHQDWLNGKEYKCKVSNKALAAPIEKTISKAKGQPREPQVCTLPPSRDELTKNQVSLSCAVKGFYPSDIAVEWESNGQPENNYKTTPPVLDSDGSFFLVSKLTVDKSRWQQGNVFSCSVMHEALHNHYTQKSLSLSPG

SEQ ID NO: 287 - protein, 327 aa, synthetic construct
  REGION 1..327: note = Artificial Sequence
DIQMTQSPSSLSASVGDRVTITCQASQDINKYLAWYQKKPGKAPKLLIHYTSNLQTGVPSRFSGSGSGTDFTFTISSLQPEDIATYYCLQYDDLFTFGQGTKLEIKASTRKAGGDIQLTQSPSSLSASVGDRVTITCRASQSISYLNWYQQKPGKSPKRWIYDTSKLASGVPSRFSGSGSGTDYTLTISSMQPEDAATYYCQQWSSNPLTFGGGTKVEIKRTVAAPSVFIFPPSDEQLKSGTASVVCLLNNFYPREAKVQWKVDNALQSGNSQESVTEQDSKDSTYSLSSTLTLSKADYEKHKVYACEVTHQGLSSPVTKSFNRGEC

SEQ ID NO: 288 - protein, 326 aa, synthetic construct
  REGION 1..326: note = Artificial Sequence
DIQMTQSPSSLSASVGDRVTITCQASQDINKYLAWYQKKPGKAPKLLIHYTSNLQTGVPSRFSGSGSGTDFTFTISSLQPEDIATYYCLQYDDLFTFGQGTKLEIKASTRKAGDIQLTQSPSSLSASVGDRVTITCRASQSISYLNWYQQKPGKSPKRWIYDTSKLASGVPSRFSGSGSGTDYTLTISSMQPEDAATYYCQQWSSNPLTFGGGTKVEIKRTVAAPSVFIFPPSDEQLKSGTASVVCLLNNFYPREAKVQWKVDNALQSGNSQESVTEQDSKDSTYSLSSTLTLSKADYEKHKVYACEVTHQGLSSPVTKSFNRGEC

SEQ ID NO: 289 - protein, 326 aa, synthetic construct
  REGION 1..326: note = Artificial Sequence
DIQMTQSPSSLSASVGDRVTITCQASQDINKYLAWYQKKPGKAPKLLIHYTSNLQTGVPSRFSGSGSGTDFTFTISSLQPEDIATYYCLQYDDLFTFGQGTKLEIKSTRKAGGDIQLTQSPSSLSASVGDRVTITCRASQSISYLNWYQQKPGKSPKRWIYDTSKLASGVPSRFSGSGSGTDYTLTISSMQPEDAATYYCQQWSSNPLTFGGGTKVEIKRTVAAPSVFIFPPSDEQLKSGTASVVCLLNNFYPREAKVQWKVDNALQSGNSQESVTEQDSKDSTYSLSSTLTLSKADYEKHKVYACEVTHQGLSSPVTKSFNRGEC

SEQ ID NO: 290 - protein, 726 aa, synthetic construct
  REGION 1..726: note = Artificial Sequence
DIVMTQSPDSLAVSLGERATINCKSSQSLLYTSSQKNYLAWYQQKPGQPPKLLIYWASTRESGVPDRFSGSGSGTDFTLTISSLQAEDVAVYYCQQYYAYPWTFGGGTKLEIKGGSSGDIVMTQSPDSLAVSLGERATINCKSSQSLLYTSSQKNYLAWYQQKPGQPPKLLIYWASTRESGVPDRFSGSGSGTDFTLTISSLQAEDVAVYYCQQYYAYPWTFGGGTKLEIKGGGGSGGSGSGGGGSASGSGQVQLVQSGAEVVKPGASVKLSCKASGYTFTSYWLHWVRQAPGQGLEWVGMIDPSNSDTRFNPNFKDRVTITADTSTSTAYMELSSLRSEDTAVYYCATYKSYVSPLDYWGQGTSVTVSSGGSSGQVQLVQSGAEVVKPGASVKLSCKASGYTFTSYWLHWVRQAPGQGLEWVGMIDPSNSDTRFNPNFKDRVTITADTSTSTAYMELSSLRSEDTAVYYCATYKSYVSPLDYWGQGTSVTVSSASGGSGDKTHTCPPCPAPEAAGGPSVFLFPPKPKDTLMISRTPEVTCVVVDVSHEDPEVKFNWYVDGVEVHNAKTKPREEQYNSTYRVVSVLTVLHQDWLNGKEYKCKVSNKALAAPIEKTISKAKGQPREPQVYTLPPCRDELTKNQVSLWCLVKGFYPSDIAVEWESNGQPENNYKTTPPVLDSDGSFFLYSKLTVDKSRWQQGNVFSCSVMHEALHNHYTQKSLSLSPG

SEQ ID NO: 291 - protein, 724 aa, synthetic construct
  REGION 1..724: note = Artificial Sequence
EIVLTQSPATLSLSPGERATLSCRASQSVDSYGNSFLHWYQQKPGQAPRLLIYWASNRATGIPARFSGSGSGTDFTLTISSLEPEDFAVYYCQQNNEDLWTFGGGTKLEIKGGSSGEIVLTQSPATLSLSPGERATLSCRASQSVDSYGNSFLHWYQQKPGQAPRLLIYWASNRATGIPARFSGSGSGTDFTLTISSLEPEDFAVYYCQQNNEDLWTFGGGTKLEIKGGGGSGGSGSGGGGSASGSGEVQLVESGGGLVKPGGSLRLSCAASGFTFQNYAMSWVRQAPGKGLEWVSSISSDATYTYYADSVKGRFTISRDNAKNVLYLQMTSLRAEDTAVYYCARHPPSYYYAFDYWGQGTTLTVSSGGSSGEVQLVESGGGLVKPGGSLRLSCAASGFTFQNYAMSWVRQAPGKGLEWVSSISSDATYTYYADSVKGRFTISRDNAKNVLYLQMTSLRAEDTAVYYCARHPPSYYYAFDYWGQGTTLTVSSASGGSGDKTHTCPPCPAPEAAGGPSVFLFPPKPKDTLMISRTPEVTCVVVDVSHEDPEVKFNWYVDGVEVHNAKTKPREEQYNSTYRVVSVLTVLHQDWLNGKEYKCKVSNKALAAPIEKTISKAKGQPREPQVYTLPPCRDELTKNQVSLWCLVKGFYPSDIAVEWESNGQPENNYKTTPPVLDSDGSFFLYSKLTVDKSRWQQGNVFSCSVMHEALHNHYTQKSLSLSPG

SEQ ID NO: 292 - protein, 710 aa, synthetic construct
  REGION 1..710: note = Artificial Sequence
DIQMTQSPSSLSASVGDRVTITCQASQDINKYLAWYQKKPGKAPKLLIHYTSNLQTGVPSRFSGSGSGTDFTFTISSLQPEDIATYYCLQYDDLFTFGQGTKLEIKGGSSGDIQMTQSPSSLSASVGDRVTITCQASQDINKYLAWYQKKPGKAPKLLIHYTSNLQTGVPSRFSGSGSGTDFTFTISSLQPEDIATYYCLQYDDLFTFGQGTKLEIKGGGGSGGSGSGGGGSASGSGQVQLVQSGAEVKKPGASVKVSCKASGSSFTGYTMNWVKQAPGQGLEWIGIINPYQGDTTYNQKFQGKVTITVDKSTSTVYMELSSLRSEDTAVYYCARGAGLYYFDYWGQGTTVTVSSGGSSGQVQLVQSGAEVKKPGASVKVSCKASGSSFTGYTMNWVKQAPGQGLEWIGIINPYQGDTTYNQKFQGKVTITVDKSTSTVYMELSSLRSEDTAVYYCARGAGLYYFDYWGQGTTVTVSSASGGSGDKTHTCPPCPAPEAAGGPSVFLFPPKPKDTLMISRTPEVTCVVVDVSHEDPEVKFNWYVDGVEVHNAKTKPREEQYNSTYRVVSVLTVLHQDWLNGKEYKCKVSNKALAAPIEKTISKAKGQPREPQVYTLPPCRDELTKNQVSLWCLVKGFYPSDIAVEWESNGQPENNYKTTPPVLDSDGSFFLYSKLTVDKSRWQQGNVFSCSVMHEALHNHYTQKSLSLSPG

SEQ ID NO: 293 - protein, 327 aa, synthetic construct
  REGION 1..327: note = Artificial Sequence
EIQLTQSPSSLSASVGDRVTITCRASSSVSYIHWFQQKPGSAPKSLIYATSNLASGVPSRFSGSGSGTDYTLTISSLQPEDFATYYCQQWTSNPPTFGCGTKLEIKASTRKAGGDIQLTQSPSSLSASVGDRVTITCRASQSISYLNWYQQKPGKSPKRWIYDTSKLASGVPSRFSGSGSGTDYTLTISSMQPEDAATYYCQQWSSNPLTFGGGTKVEIKRTVAAPSVFIFPPSDEQLKSGTASVVCLLNNFYPREAKVQWKVDNALQSGNSQESVTEQDSKDSTYSLSSTLTLSKADYEKHKVYACEVTHQGLSSPVTKSFNRGEC

SEQ ID NO: 294 - protein, 577 aa, synthetic construct
  REGION 1..577: note = Artificial Sequence
QVQLVQPGAEVKKPGASVKMSCKASGYTFTSYNMHWVRQAPGRCLEWMGAIYPGSGDTSYSQKFQGKVTLTADKSTSTAYMELSSLESEDTAVYYCARSTYYGGDWYFNVWGAGTTVTVSAASTRKAGGQVQLVQSGAEVAKPGASVKVSCKASGYTFTRYTMHWVKQAPGQGLEWIGYINPSRGYTNYAQKFQGKATLTTDKSTSTAYMELSSLRSEDTAVYYCARYYDDHYSLDYWGQGTTLTVSSASTKGPSVFPLAPSSKSTSGGTAALGCLVKDYFPEPVTVSWNSGALTSGVHTFPAVLQSSGLYSLSSVVTVPSSSLGTQTYICNVNHKPSNTKVDKKVEPKSCDKTHTCPPCPAPELLGGPSVFLFPPKPKDTLMISRTPEVTCVVVDVSHEDPEVKFNWYVDGVEVHNAKTKPREEQYNSTYRVVSVLTVLHQDWLNGKEYKCKVSNKALPAPIEKTISKAKGQPREPQVCTLPPSRDELTKNQVSLSCAVKGFYPSDIAVEWESNGQPENNYKTTPPVLDSDGSFFLVSKLTVDKSRWQQGNVFSCSVMHEALHNHYTQKSLSLSPG

SEQ ID NO: 295 - protein, 577 aa, synthetic construct
  REGION 1..577: note = Artificial Sequence
QVQLVQPGAEVKKPGASVKMSCKASGYTFTSYNMHWVRQAPGRCLEWMGAIYPGSGDTSYSQKFQGKVTLTADKSTSTAYMELSSLESEDTAVYYCARSTYYGGDWYFNVWGAGTTVTVSAASTRKAGGQVQLVQSGAEVAKPGASVKVSCKASGYTFTRYTMHWVKQAPGQGLEWIGYINPSRGYTNYAQKFQGKATLTTDKSTSTAYMELSSLRSEDTAVYYCARYYDDHYSLDYWGQGTTLTVSSASTKGPSVFPLAPSSKSTSGGTAALGCLVKDYFPEPVTVSWNSGALTSGVHTFPAVLQSSGLYSLSSVVTVPSSSLGTQTYICNVNHKPSNTKVDKKVEPKSCDKTHTCPPCPAPELLGGPSVFLFPPKPKDTLMISRTPEVTCVVVDVSHEDPEVKFNWYVDGVEVHNAKTKPREEQYNSTYRVVSVLTVLHQDWLNGKEYKCKVSNKALPAPIEKTISKAKGQPREPQVYTLPPSRDELTKNQVSLTCLVKGFYPSDIAVEWESNGQPENNYKTTPPVLDSDGSFFLYSKLTVDKSRWQQGNVFSCSVMHEALHNHYTQKSLSLSPG

SEQ ID NO: 296 - protein, 324 aa, synthetic construct
  REGION 1..324: note = Artificial Sequence
EIQLTQSPSSLSASVGDRVTITCRASSSVSYIHWFQQKPGSAPKSLIYATSNLASGVPSRFSGSGSGTDYTLTISSLQPEDFATYYCQQWTSNPPTFGGGTKLEIKGGSGSDIQLTQSPSSLSASVGDRVTITCRASQSISYLNWYQQKPGKSPKRWIYDTSKLASGVPSRFSGSGSGTDYTLTISSMQPEDAATYYCQQWSSNPLTFGGGTKVEIKRTVAAPSVFIFPPSDEQLKSGTASVVCLLNNFYPREAKVQWKVDNALQSGNSQESVTEQDSKDSTYSLSSTLTLSKADYEKHKVYACEVTHQGLSSPVTKSFNRGEC

SEQ ID NO: 297 - protein, 574 aa, synthetic construct
  REGION 1..574: note = Artificial Sequence
QVQLVQPGAEVKKPGASVKMSCKASGYTFTSYNMHWVRQAPGRGLEWMGAIYPGSGDTSYSQKFQGKVTLTADKSTSTAYMELSSLESEDTAVYYCARSTYYGGDWYFNVWGAGTTVTVSAGGSGSQVQLVQSGAEVAKPGASVKVSCKASGYTFTRYTMHWVKQAPGQGLEWIGYINPSRGYTNYAQKFQGKATLTTDKSTSTAYMELSSLRSEDTAVYYCARYYDDHYSLDYWGQGTTLTVSSASTKGPSVFPLAPSSKSTSGGTAALGCLVKDYFPEPVTVSWNSGALTSGVHTFPAVLQSSGLYSLSSVVTVPSSSLGTQTYICNVNHKPSNTKVDKKVEPKSCDKTHTCPPCPAPELLGGPSVFLFPPKPKDTLMISRTPEVTCVVVDVSHEDPEVKFNWYVDGVEVHNAKTKPREEQYNSTYRVVSVLTVLHQDWLNGKEYKCKVSNKALPAPIEKTISKAKGQPREPQVCTLPPSRDELTKNQVSLSCAVKGFYPSDIAVEWESNGQPENNYKTTPPVLDSDGSFFLVSKLTVDKSRWQQGNVFSCSVMHEALHNHYTQKSLSLSPG

SEQ ID NO: 298 - protein, 574 aa, synthetic construct
  REGION 1..574: note = Artificial Sequence
QVQLVQPGAEVKKPGASVKMSCKASGYTFTSYNMHWVRQAPGRGLEWMGAIYPGSGDTSYSQKFQGKVTLTADKSTSTAYMELSSLESEDTAVYYCARSTYYGGDWYFNVWGAGTTVTVSAGGSGSQVQLVQSGAEVAKPGASVKVSCKASGYTFTRYTMHWVKQAPGQGLEWIGYINPSRGYTNYAQKFQGKATLTTDKSTSTAYMELSSLRSEDTAVYYCARYYDDHYSLDYWGQGTTLTVSSASTKGPSVFPLAPSSKSTSGGTAALGCLVKDYFPEPVTVSWNSGALTSGVHTFPAVLQSSGLYSLSSVVTVPSSSLGTQTYICNVNHKPSNTKVDKKVEPKSCDKTHTCPPCPAPELLGGPSVFLFPPKPKDTLMISRTPEVTCVVVDVSHEDPEVKFNWYVDGVEVHNAKTKPREEQYNSTYRVVSVLTVLHQDWLNGKEYKCKVSNKALPAPIEKTISKAKGQPREPQVYTLPPSRDELTKNQVSLTCLVKGFYPSDIAVEWESNGQPENNYKTTPPVLDSDGSFFLYSKLTVDKSRWQQGNVFSCSVMHEALHNHYTQKSLSLSPG

SEQ ID NO: 299 - protein, 479 aa, synthetic construct
  REGION 1..479: note = Artificial Sequence
EIQLTQSPSSLSASVGDRVTITCRASSSVSYIHWFQQKPGSAPKSLIYATSNLASGVPSRFSGSGSGTDYTLTISSLQPEDFATYYCQQWTSNPPTFGGGTKLEIKGGGGSGGSGSGGGGSASGSGQVQLVQPGAEVKKPGASVKMSCKASGYTFTSYNMHWVRQAPGRGLEWMGAIYPGSGDTSYSQKFQGKVTLTADKSTSTAYMELSSLESEDTAVYYCARSTYYGGDWYFNVWGAGTTVTVSAASGGSGDKTHTCPPCPAPELLGGPSVFLFPPKPKDTLMISRTPEVTCVVVDVSHEDPEVKFNWYVDGVEVHNAKTKPREEQYNSTYRVVSVLTVLHQDWLNGKEYKCKVSNKALPAPIEKTISKAKGQPREPQVYTLPPCRDELTKNQVSLWCLVKGFYPSDIAVEWESNGQPENNYKTTPPVLDSDGSFFLYSKLTVDKSRWQQGNVFSCSVMHEALHNHYTQKSLSLSPG

SEQ ID NO: 300 - protein, 716 aa, synthetic construct
  REGION 1..716: note = Artificial Sequence
EIQLTQSPSSLSASVGDRVTITCRASSSVSYIHWFQQKPGSAPKSLIYATSNLASGVPSRFSGSGSGTDYTLTISSLQPEDFATYYCQQWTSNPPTFGGGTKLEIKGGSSGEIQLTQSPSSLSASVGDRVTITCRASSSVSYIHWFQQKPGSAPKSLIYATSNLASGVPSRFSGSGSGTDYTLTISSLQPEDFATYYCQQWTSNPPTFGGGTKLEIKGGGGSGGSGSGGGGSASGSGQVQLVQPGAEVKKPGASVKMSCKASGYTFTSYNMHWVRQAPGRGLEWMGAIYPGSGDTSYSQKFQGKVTLTADKSTSTAYMELSSLESEDTAVYYCARSTYYGGDWYFNVWGAGTTVTVSAGGSSGQVQLVQPGAEVKKPGASVKMSCKASGYTFTSYNMHWVRQAPGRGLEWMGAIYPGSGDTSYSQKFQGKVTLTADKSTSTAYMELSSLESEDTAVYYCARSTYYGGDWYFNVWGAGTTVTVSAASGGSGDKTHTCPPCPAPELLGGPSVFLFPPKPKDTLMISRTPEVTCVVVDVSHEDPEVKFNWYVDGVEVHNAKTKPREEQYNSTYRVVSVLTVLHQDWLNGKEYKCKVSNKALPAPIEKTISKAKGQPREPQVYTLPPCRDELTKNQVSLWCLVKGFYPSDIAVEWESNGQPENNYKTTPPVLDSDGSFFLYSKLTVDKSRWQQGNVFSCSVMHEALHNHYTQKSLSLSPG

SEQ ID NO: 301 - protein, 724 aa, synthetic construct
  REGION 1..724: note = Artificial Sequence
EIQLTQSPSSLSASVGDRVTITCRASSSVSYIHWFQQKPGSAPKSLIYATSNLASGVPSRFSGSGSGTDYTLTISSLQPEDFATYYCQQWTSNPPTFGGGTKLEIKGGSSGDIQLTQSPSFLSASVGDRVTITCKASQSVDYSGDSYLNWYQQKPGKAPKLLIYDASNLVSGVPSRFSGSGSGTEFTLTISSLQPEDFATYYCQQSTENPWTFGGGTKLEIKGGGGSGGSGSGGGGSASGSGQVQLVQSGAEVKKPGSSVKVSCKASGYAFSSYWMNWVRQAPGQGLEWMGQIWPGDSDTNYAQKFQGRVTITADESTSTAYMELSSLRSEDTAVYYCARRETTTVGRYYYAMDYWGQGTTVTVSSGGSSGQVQLVQPGAEVKKPGASVKMSCKASGYTFTSYNMHWVRQAPGRGLEWMGAIYPGSGDTSYSQKFQGKVTLTADKSTSTAYMELSSLESEDTAVYYCARSTYYGGDWYFNVWGAGTTVTVSAASGGSGDKTHTCPPCPAPELLGGPSVFLFPPKPKDTLMISRTPEVTCVVVDVSHEDPEVKFNWYVDGVEVHNAKTKPREEQYNSTYRVVSVLTVLHQDWLNGKEYKCKVSNKALPAPIEKTISKAKGQPREPQVYTLPPCRDELTKNQVSLWCLVKGFYPSDIAVEWESNGQPENNYKTTPPVLDSDGSFFLYSKLTVDKSRWQQGNVFSCSVMHEALHNHYTQKSLSLSPG

SEQ ID NO: 302 - protein, 724 aa, synthetic construct
  REGION 1..724: note = Artificial Sequence
DIQLTQSPSFLSASVGDRVTITCKASQSVDYSGDSYLNWYQQKPGKAPKLLIYDASNLVSGVPSRFSGSGSGTEFTLTISSLQPEDFATYYCQQSTENPWTFGGGTKLEIKGGSSGEIQLTQSPSSLSASVGDRVTITCRASSSVSYIHWFQQKPGSAPKSLIYATSNLASGVPSRFSGSGSGTDYTLTISSLQPEDFATYYCQQWTSNPPTFGGGTKLEIKGGGGSGGSGSGGGGSASGSGQVQLVQPGAEVKKPGASVKMSCKASGYTFTSYNMHWVRQAPGRGLEWMGAIYPGSGDTSYSQKFQGKVTLTADKSTSTAYMELSSLESEDTAVYYCARSTYYGGDWYFNVWGAGTTVTVSAGGSSGQVQLVQSGAEVKKPGSSVKVSCKASGYAFSSYWMNWVRQAPGQGLEWMGQIWPGDSDTNYAQKFQGRVTITADESTSTAYMELSSLRSEDTAVYYCARRETTTVGRYYYAMDYWGQGTTVTVSSASGGSGDKTHTCPPCPAPELLGGPSVFLFPPKPKDTLMISRTPEVTCVVVDVSHEDPEVKFNWYVDGVEVHNAKTKPREEQYNSTYRVVSVLTVLHQDWLNGKEYKCKVSNKALPAPIEKTISKAKGQPREPQVYTLPPCRDELTKNQVSLWCLVKGFYPSDIAVEWESNGQPENNYKTTPPVLDSDGSFFLYSKLTVDKSRWQQGNVFSCSVMHEALHNHYTQKSLSLSPG

SEQ ID NO: 303 - protein, 327 aa, synthetic construct
  REGION 1..327: note = Artificial Sequence
EIQLTQSPSSLSASVGDRVTITCRASSSVSYIHWFQQKPGSAPKSLIYATSNLASGVPSRFSGSGSGTDYTLTISSLQPEDFATYYCQQWTSNPPTFGGGTKLEIKASTRKAGGDIQLTQSPSSLSASVGDRVTITCRASQSISYLNWYQQKPGKSPKRWIYDTSKLASGVPSRFSGSGSGTDYTLTISSMQPEDAATYYCQQWSSNPLTFGGGTKVEIKRTVAAPSVFIFPPSDEQLKSGTASVVCLLNNFYPREAKVQWKVDNALQSGNSQESVTEQDSKDSTYSLSSTLTLSKADYEKHKVYACEVTHQGLSSPVTKSFNRGEC

SEQ ID NO: 304 - protein, 324 aa, synthetic construct
  REGION 1..324: note = Artificial Sequence
EIQLTQSPSSLSASVGDRVTITCRASSSVSYIHWFQQKPGSAPKSLIYATSNLASGVPSRFSGSGSGTDYTLTISSLQPEDFATYYCQQWTSNPPTFGCGTKLEIKGGSGSDIQLTQSPSSLSASVGDRVTITCRASQSISYLNWYQQKPGKSPKRWIYDTSKLASGVPSRFSGSGSGTDYTLTISSMQPEDAATYYCQQWSSNPLTFGGGTKVEIKRTVAAPSVFIFPPSDEQLKSGTASVVCLLNNFYPREAKVQWKVDNALQSGNSQESVTEQDSKDSTYSLSSTLTLSKADYEKHKVYACEVTHQGLSSPVTKSFNRGEC

SEQ ID NO: 305 - protein, 577 aa, synthetic construct
  REGION 1..577: note = Artificial Sequence
QVQLVQPGAEVKKPGASVKMSCKASGYTFTSYNMHWVRQAPGRGLEWMGAIYPGNGDTSYNQKFQGRVTLTADKSTSTAYMELSSLESEDTAVYYCARSTYYGGDWYFNVWGAGTTVTVSAASTRKAGGQVQLVQSGAEVAKPGASVKVSCKASGYTFTRYTMHWVKQAPGQGLEWIGYINPSRGYTNYAQKFQGKATLTTDKSTSTAYMELSSLRSEDTAVYYCARYYDDHYSLDYWGQGTTLTVSSASTKGPSVFPLAPSSKSTSGGTAALGCLVKDYFPEPVTVSWNSGALTSGVHTFPAVLQSSGLYSLSSVVTVPSSSLGTQTYICNVNHKPSNTKVDKKVEPKSCDKTHTCPPCPAPELLGGPSVFLFPPKPKDTLMISRTPEVTCVVVDVSHEDPEVKFNWYVDGVEVHNAKTKPREEQYNSTYRVVSVLTVLHQDWLNGKEYKCKVSNKALPAPIEKTISKAKGQPREPQVCTLPPSRDELTKNQVSLSCAVKGFYPSDIAVEWESNGQPENNYKTTPPVLDSDGSFFLVSKLTVDKSRWQQGNVFSCSVMHEALHNHYTQKSLSLSPG

SEQ ID NO: 306 - protein, 577 aa, synthetic construct
  REGION 1..577: note = Artificial Sequence
QVQLVQPGAEVKKPGASVKMSCKASGYTFTSYNMHWVRQAPGRGLEWMGAIYPGNGDTSYNQKFQGRVTLTADKSTSTAYMELSSLESEDTAVYYCARSTYYGGDWYFNVWGAGTTVTVSAASTRKAGGQVQLVQSGAEVAKPGASVKVSCKASGYTFTRYTMHWVKQAPGQGLEWIGYINPSRGYTNYAQKFQGKATLTTDKSTSTAYMELSSLRSEDTAVYYCARYYDDHYSLDYWGQGTTLTVSSASTKGPSVFPLAPSSKSTSGGTAALGCLVKDYFPEPVTVSWNSGALTSGVHTFPAVLQSSGLYSLSSVVTVPSSSLGTQTYICNVNHKPSNTKVDKKVEPKSCDKTHTCPPCPAPEAAGGPSVFLFPPKPKDTLMISRTPEVTCVVVDVSHEDPEVKFNWYVDGVEVHNAKTKPREEQYNSTYRVVSVLTVLHQDWLNGKEYKCKVSNKALAAPIEKTISKAKGQPREPQVCTLPPSRDELTKNQVSLSCAVKGFYPSDIAVEWESNGQPENNYKTTPPVLDSDGSFFLVSKLTVDKSRWQQGNVFSCSVMHEALHNHYTQKSLSLSPG

SEQ ID NO: 307 - protein, 577 aa, synthetic construct
  REGION 1..577: note = Artificial Sequence
QVQLVQPGAEVKKPGASVKMSCKASGYTFTSYNMHWVRQAPGRCLEWMGAIYPGNGDTSYNQKFQGRVTLTADKSTSTAYMELSSLESEDTAVYYCARSTYYGGDWYFNVWGAGTTVTVSAASTRKAGGQVQLVQSGAEVAKPGASVKVSCKASGYTFTRYTMHWVKQAPGQGLEWIGYINPSRGYTNYAQKFQGKATLTTDKSTSTAYMELSSLRSEDTAVYYCARYYDDHYSLDYWGQGTTLTVSSASTKGPSVFPLAPSSKSTSGGTAALGCLVKDYFPEPVTVSWNSGALTSGVHTFPAVLQSSGLYSLSSVVTVPSSSLGTQTYICNVNHKPSNTKVDKKVEPKSCDKTHTCPPCPAPELLGGPSVFLFPPKPKDTLMISRTPEVTCVVVDVSHEDPEVKFNWYVDGVEVHNAKTKPREEQYNSTYRVVSVLTVLHQDWLNGKEYKCKVSNKALPAPIEKTISKAKGQPREPQVCTLPPSRDELTKNQVSLSCAVKGFYPSDIAVEWESNGQPENNYKTTPPVLDSDGSFFLVSKLTVDKSRWQQGNVFSCSVMHEALHNHYTQKSLSLSPG

SEQ ID NO: 308 - protein, 577 aa, synthetic construct
  REGION 1..577: note = Artificial Sequence
QVQLVQPGAEVKKPGASVKMSCKASGYTFTSYNMHWVRQAPGRCLEWMGAIYPGNGDTSYNQKFQGRVTLTADKSTSTAYMELSSLESEDTAVYYCARSTYYGGDWYFNVWGAGTTVTVSAASTRKAGGQVQLVQSGAEVAKPGASVKVSCKASGYTFTRYTMHWVKQAPGQGLEWIGYINPSRGYTNYAQKFQGKATLTTDKSTSTAYMELSSLRSEDTAVYYCARYYDDHYSLDYWGQGTTLTVSSASTKGPSVFPLAPSSKSTSGGTAALGCLVKDYFPEPVTVSWNSGALTSGVHTFPAVLQSSGLYSLSSVVTVPSSSLGTQTYICNVNHKPSNTKVDKKVEPKSCDKTHTCPPCPAPEAAGGPSVFLFPPKPKDTLMISRTPEVTCVVVDVSHEDPEVKFNWYVDGVEVHNAKTKPREEQYNSTYRVVSVLTVLHQDWLNGKEYKCKVSNKALAAPIEKTISKAKGQPREPQVCTLPPSRDELTKNQVSLSCAVKGFYPSDIAVEWESNGQPENNYKTTPPVLDSDGSFFLVSKLTVDKSRWQQGNVFSCSVMHEALHNHYTQKSLSLSPG

SEQ ID NO: 309 - protein, 574 aa, synthetic construct
  REGION 1..574: note = Artificial Sequence
QVQLVQPGAEVKKPGASVKMSCKASGYTFTSYNMHWVRQAPGRGLEWMGAIYPGNGDTSYNQKFQGRVTLTADKSTSTAYMELSSLESEDTAVYYCARSTYYGGDWYFNVWGAGTTVTVSAGGSGSQVQLVQSGAEVAKPGASVKVSCKASGYTFTRYTMHWVKQAPGQGLEWIGYINPSRGYTNYAQKFQGKATLTTDKSTSTAYMELSSLRSEDTAVYYCARYYDDHYSLDYWGQGTTLTVSSASTKGPSVFPLAPSSKSTSGGTAALGCLVKDYFPEPVTVSWNSGALTSGVHTFPAVLQSSGLYSLSSVVTVPSSSLGTQTYICNVNHKPSNTKVDKKVEPKSCDKTHTCPPCPAPELLGGPSVFLFPPKPKDTLMISRTPEVTCVVVDVSHEDPEVKFNWYVDGVEVHNAKTKPREEQYNSTYRVVSVLTVLHQDWLNGKEYKCKVSNKALPAPIEKTISKAKGQPREPQVCTLPPSRDELTKNQVSLSCAVKGFYPSDIAVEWESNGQPENNYKTTPPVLDSDGSFFLVSKLTVDKSRWQQGNVFSCSVMHEALHNHYTQKSLSLSPG

SEQ ID NO: 310 - protein, 574 aa, synthetic construct
  REGION 1..574: note = Artificial Sequence
QVQLVQPGAEVKKPGASVKMSCKASGYTFTSYNMHWVRQAPGRGLEWMGAIYPGNGDTSYNQKFQGRVTLTADKSTSTAYMELSSLESEDTAVYYCARSTYYGGDWYFNVWGAGTTVTVSAGGSGSQVQLVQSGAEVAKPGASVKVSCKASGYTFTRYTMHWVKQAPGQGLEWIGYINPSRGYTNYAQKFQGKATLTTDKSTSTAYMELSSLRSEDTAVYYCARYYDDHYSLDYWGQGTTLTVSSASTKGPSVFPLAPSSKSTSGGTAALGCLVKDYFPEPVTVSWNSGALTSGVHTFPAVLQSSGLYSLSSVVTVPSSSLGTQTYICNVNHKPSNTKVDKKVEPKSCDKTHTCPPCPAPEAAGGPSVFLFPPKPKDTLMISRTPEVTCVVVDVSHEDPEVKFNWYVDGVEVHNAKTKPREEQYNSTYRVVSVLTVLHQDWLNGKEYKCKVSNKALAAPIEKTISKAKGQPREPQVCTLPPSRDELTKNQVSLSCAVKGFYPSDIAVEWESNGQPENNYKTTPPVLDSDGSFFLVSKLTVDKSRWQQGNVFSCSVMHEALHNHYTQKSLSLSPG

SEQ ID NO: 311 - protein, 332 aa, synthetic construct
  REGION 1..332: note = Artificial Sequence
DIQLTQSPSFLSASVGDRVTITCKASQSVDYSGDSYLNWYQQKPGKAPKLLIYDASNLVSGVPSRFSGSGSGTEFTLTISSLQPEDFATYYCQQSTENPWTFGCGTKLEIKASTRKAGGDIQLTQSPSSLSASVGDRVTITCRASQSISYLNWYQQKPGKSPKRWIYDTSKLASGVPSRFSGSGSGTDYTLTISSMQPEDAATYYCQQWSSNPLTFGGGTKVEIKRTVAAPSVFIFPPSDEQLKSGTASVVCLLNNFYPREAKVQWKVDNALQSGNSQESVTEQDSKDSTYSLSSTLTLSKADYEKHKVYACEVTHQGLSSPVTKSFNRGEC

SEQ ID NO: 312 - protein, 332 aa, synthetic construct
  REGION 1..332: note = Artificial Sequence
DIQLTQSPSFLSASVGDRVTITCKASQSVDYSGDSYLNWYQQKPGKAPKLLIYDASNLVSGVPSRFSGSGSGTEFTLTISSLQPEDFATYYCQQSTENPWTFGGGTKLEIKASTRKAGGDIQLTQSPSSLSASVGDRVTITCRASQSISYLNWYQQKPGKSPKRWIYDTSKLASGVPSRFSGSGSGTDYTLTISSMQPEDAATYYCQQWSSNPLTFGGGTKVEIKRTVAAPSVFIFPPSDEQLKSGTASVVCLLNNFYPREAKVQWKVDNALQSGNSQESVTEQDSKDSTYSLSSTLTLSKADYEKHKVYACEVTHQGLSSPVTKSFNRGEC

SEQ ID NO: 313 - protein, 580 aa, synthetic construct
  REGION 1..580: note = Artificial Sequence
QVQLVQSGAEVKKPGSSVKVSCKASGYAFSSYWMNWVRQAPGQGLEWMGQIWPGDSDTNYAQKFQGRVTITADESTSTAYMELSSLRSEDTAVYYCARRETTTVGRYYYAMDYWGQGTTVTVSSASTRKAGGQVQLVQSGAEVAKPGASVKVSCKASGYTFTRYTMHWVKQAPGQGLEWIGYINPSRGYTNYAQKFQGKATLTTDKSTSTAYMELSSLRSEDTAVYYCARYYDDHYSLDYWGQGTTLTVSSASTKGPSVFPLAPSSKSTSGGTAALGCLVKDYFPEPVTVSWNSGALTSGVHTFPAVLQSSGLYSLSSVVTVPSSSLGTQTYICNVNHKPSNTKVDKKVEPKSCDKTHTCPPCPAPELLGGPSVFLFPPKPKDTLMISRTPEVTCVVVDVSHEDPEVKFNWYVDGVEVHNAKTKPREEQYNSTYRVVSVLTVLHQDWLNGKEYKCKVSNKALPAPIEKTISKAKGQPREPQVCTLPPSRDELTKNQVSLSCAVKGFYPSDIAVEWESNGQPENNYKTTPPVLDSDGSFFLVSKLTVDKSRWQQGNVFSCSVMHEALHNHYTQKSLSLSPG

SEQ ID NO: 314 - protein, 580 aa, synthetic construct
  REGION 1..580: note = Artificial Sequence
QVQLVQSGAEVKKPGSSVKVSCKASGYAFSSYWMNWVRQAPGQGLEWMGQIWPGDSDTNYAQKFQGRVTITADESTSTAYMELSSLRSEDTAVYYCARRETTTVGRYYYAMDYWGQGTTVTVSSASTRKAGGQVQLVQSGAEVAKPGASVKVSCKASGYTFTRYTMHWVKQAPGQGLEWIGYINPSRGYTNYAQKFQGKATLTTDKSTSTAYMELSSLRSEDTAVYYCARYYDDHYSLDYWGQGTTLTVSSASTKGPSVFPLAPSSKSTSGGTAALGCLVKDYFPEPVTVSWNSGALTSGVHTFPAVLQSSGLYSLSSVVTVPSSSLGTQTYICNVNHKPSNTKVDKKVEPKSCDKTHTCPPCPAPEAAGGPSVFLFPPKPKDTLMISRTPEVTCVVVDVSHEDPEVKFNWYVDGVEVHNAKTKPREEQYNSTYRVVSVLTVLHQDWLNGKEYKCKVSNKALAAPIEKTISKAKGQPREPQVCTLPPSRDELTKNQVSLSCAVKGFYPSDIAVEWESNGQPENNYKTTPPVLDSDGSFFLVSKLTVDKSRWQQGNVFSCSVMHEALHNHYTQKSLSLSPG

SEQ ID NO: 315 - protein, 580 aa, synthetic construct
  REGION 1..580: note = Artificial Sequence
QVQLVQSGAEVKKPGSSVKVSCKASGYAFSSYWMNWVRQAPGQCLEWMGQIWPGDSDTNYAQKFQGRVTITADESTSTAYMELSSLRSEDTAVYYCARRETTTVGRYYYAMDYWGQGTTVTVSSASTRKAGGQVQLVQSGAEVAKPGASVKVSCKASGYTFTRYTMHWVKQAPGQGLEWIGYINPSRGYTNYAQKFQGKATLTTDKSTSTAYMELSSLRSEDTAVYYCARYYDDHYSLDYWGQGTTLTVSSASTKGPSVFPLAPSSKSTSGGTAALGCLVKDYFPEPVTVSWNSGALTSGVHTFPAVLQSSGLYSLSSVVTVPSSSLGTQTYICNVNHKPSNTKVDKKVEPKSCDKTHTCPPCPAPELLGGPSVFLFPPKPKDTLMISRTPEVTCVVVDVSHEDPEVKFNWYVDGVEVHNAKTKPREEQYNSTYRVVSVLTVLHQDWLNGKEYKCKVSNKALPAPIEKTISKAKGQPREPQVCTLPPSRDELTKNQVSLSCAVKGFYPSDIAVEWESNGQPENNYKTTPPVLDSDGSFFLVSKLTVDKSRWQQGNVFSCSVMHEALHNHYTQKSLSLSPG

SEQ ID NO: 316 - protein, 580 aa, synthetic construct
  REGION 1..580: note = Artificial Sequence
QVQLVQSGAEVKKPGSSVKVSCKASGYAFSSYWMNWVRQAPGQCLEWMGQIWPGDSDTNYAQKFQGRVTITADESTSTAYMELSSLRSEDTAVYYCARRETTTVGRYYYAMDYWGQGTTVTVSSASTRKAGGQVQLVQSGAEVAKPGASVKVSCKASGYTFTRYTMHWVKQAPGQGLEWIGYINPSRGYTNYAQKFQGKATLTTDKSTSTAYMELSSLRSEDTAVYYCARYYDDHYSLDYWGQGTTLTVSSASTKGPSVFPLAPSSKSTSGGTAALGCLVKDYFPEPVTVSWNSGALTSGVHTFPAVLQSSGLYSLSSVVTVPSSSLGTQTYICNVNHKPSNTKVDKKVEPKSCDKTHTCPPCPAPEAAGGPSVFLFPPKPKDTLMISRTPEVTCVVVDVSHEDPEVKFNWYVDGVEVHNAKTKPREEQYNSTYRVVSVLTVLHQDWLNGKEYKCKVSNKALAAPIEKTISKAKGQPREPQVCTLPPSRDELTKNQVSLSCAVKGFYPSDIAVEWESNGQPENNYKTTPPVLDSDGSFFLVSKLTVDKSRWQQGNVFSCSVMHEALHNHYTQKSLSLSPG

SEQ ID NO: 317 - protein, 329 aa, synthetic construct
  REGION 1..329: note = Artificial Sequence
DIQLTQSPSFLSASVGDRVTITCKASQSVDYSGDSYLNWYQQKPGKAPKLLIYDASNLVSGVPSRFSGSGSGTEFTLTISSLQPEDFATYYCQQSTENPWTFGGGTKLEIKGGSGSDIQLTQSPSSLSASVGDRVTITCRASQSISYLNWYQQKPGKSPKRWIYDTSKLASGVPSRFSGSGSGTDYTLTISSMQPEDAATYYCQQWSSNPLTFGGGTKVEIKRTVAAPSVFIFPPSDEQLKSGTASVVCLLNNFYPREAKVQWKVDNALQSGNSQESVTEQDSKDSTYSLSSTLTLSKADYEKHKVYACEVTHQGLSSPVTKSFNRGEC

SEQ ID NO: 318 - protein, 329 aa, synthetic construct
  REGION 1..329: note = Artificial Sequence
DIQLTQSPSFLSASVGDRVTITCKASQSVDYSGDSYLNWYQQKPGKAPKLLIYDASNLVSGVPSRFSGSGSGTEFTLTISSLQPEDFATYYCQQSTENPWTFGCGTKLEIKGGSGSDIQLTQSPSSLSASVGDRVTITCRASQSISYLNWYQQKPGKSPKRWIYDTSKLASGVPSRFSGSGSGTDYTLTISSMQPEDAATYYCQQWSSNPLTFGGGTKVEIKRTVAAPSVFIFPPSDEQLKSGTASVVCLLNNFYPREAKVQWKVDNALQSGNSQESVTEQDSKDSTYSLSSTLTLSKADYEKHKVYACEVTHQGLSSPVTKSFNRGEC

SEQ ID NO: 319 - protein, 577 aa, synthetic construct
  REGION 1..577: note = Artificial Sequence
QVQLVQSGAEVKKPGSSVKVSCKASGYAFSSYWMNWVRQAPGQGLEWMGQIWPGDSDTNYAQKFQGRVTITADESTSTAYMELSSLRSEDTAVYYCARRETTTVGRYYYAMDYWGQGTTVTVSSGGSGSQVQLVQSGAEVAKPGASVKVSCKASGYTFTRYTMHWVKQAPGQGLEWIGYINPSRGYTNYAQKFQGKATLTTDKSTSTAYMELSSLRSEDTAVYYCARYYDDHYSLDYWGQGTTLTVSSASTKGPSVFPLAPSSKSTSGGTAALGCLVKDYFPEPVTVSWNSGALTSGVHTFPAVLQSSGLYSLSSVVTVPSSSLGTQTYICNVNHKPSNTKVDKKVEPKSCDKTHTCPPCPAPELLGGPSVFLFPPKPKDTLMISRTPEVTCVVVDVSHEDPEVKFNWYVDGVEVHNAKTKPREEQYNSTYRVVSVLTVLHQDWLNGKEYKCKVSNKALPAPIEKTISKAKGQPREPQVCTLPPSRDELTKNQVSLSCAVKGFYPSDIAVEWESNGQPENNYKTTPPVLDSDGSFFLVSKLTVDKSRWQQGNVFSCSVMHEALHNHYTQKSLSLSPG

SEQ ID NO: 320 - protein, 577 aa, synthetic construct
  REGION 1..577: note = Artificial Sequence
QVQLVQSGAEVKKPGSSVKVSCKASGYAFSSYWMNWVRQAPGQGLEWMGQIWPGDSDTNYAQKFQGRVTITADESTSTAYMELSSLRSEDTAVYYCARRETTTVGRYYYAMDYWGQGTTVTVSSGGSGSQVQLVQSGAEVAKPGASVKVSCKASGYTFTRYTMHWVKQAPGQGLEWIGYINPSRGYTNYAQKFQGKATLTTDKSTSTAYMELSSLRSEDTAVYYCARYYDDHYSLDYWGQGTTLTVSSASTKGPSVFPLAPSSKSTSGGTAALGCLVKDYFPEPVTVSWNSGALTSGVHTFPAVLQSSGLYSLSSVVTVPSSSLGTQTYICNVNHKPSNTKVDKKVEPKSCDKTHTCPPCPAPEAAGGPSVFLFPPKPKDTLMISRTPEVTCVVVDVSHEDPEVKFNWYVDGVEVHNAKTKPREEQYNSTYRVVSVLTVLHQDWLNGKEYKCKVSNKALAAPIEKTISKAKGQPREPQVCTLPPSRDELTKNQVSLSCAVKGFYPSDIAVEWESNGQPENNYKTTPPVLDSDGSFFLVSKLTVDKSRWQQGNVFSCSVMHEALHNHYTQKSLSLSPG

SEQ ID NO: 321 - protein, 724 aa, synthetic construct
  REGION 1..724: note = Artificial Sequence
DIQLTQSPSFLSASVGDRVTITCKASQSVDYSGDSYLNWYQQKPGKAPKLLIYDASNLVSGVPSRFSGSGSGTEFTLTISSLQPEDFATYYCQQSTENPWTFGGGTKLEIKGGSSGDIQMTQSPSSLSASVGDRVTITCHASQNIYVWLNWYQQKPGKAPKLLIYKASNLHTGVPSRFSGSGSGTDFTLTISSLQPEDFATYYCQQGQTYPYTFGGGTKVEIKGGGGSGGSGSGGGGSASGSGQVQLVQSGAEVKKPGASVKVSCKASGYTFTSYYIHWVRQAPGQGLEWIGSIYPGNVNTNYNEKFKDRATLTVDTSISTAYMELSRLRSDDTAVYFCTRSHYGLDWNFDVWGQGTTVTVSSGGSSGQVQLVQSGAEVKKPGSSVKVSCKASGYAFSSYWMNWVRQAPGQGLEWMGQIWPGDSDTNYAQKFQGRVTITADESTSTAYMELSSLRSEDTAVYYCARRETTTVGRYYYAMDYWGQGTTVTVSSASGGSGDKTHTCPPCPAPEAAGGPSVFLFPPKPKDTLMISRTPEVTCVVVDVSHEDPEVKFNWYVDGVEVHNAKTKPREEQYNSTYRVVSVLTVLHQDWLNGKEYKCKVSNKALAAPIEKTISKAKGQPREPQVYTLPPCRDELTKNQVSLWCLVKGFYPSDIAVEWESNGQPENNYKTTPPVLDSDGSFFLYSKLTVDKSRWQQGNVFSCSVMHEALHNHYTQKSLSLSPG

SEQ ID NO: 322 - protein, 724 aa, synthetic construct
  REGION 1..724: note = Artificial Sequence
DIQLTQSPSFLSASVGDRVTITCKASQSVDYSGDSYLNWYQQKPGKAPKLLIYDASNLVSGVPSRFSGSGSGTEFTLTISSLQPEDFATYYCQQSTENPWTFGGGTKLEIKGGSSGDIQMTQSPSSLSASVGDRVTITCHASQNIYVWLNWYQQKPGKAPKLLIYKASNLHTGVPSRFSGSGSGTDFTLTISSLQPEDFATYYCQQGQTYPYTFGGGTKVEIKGGGGSGGSGSGGGGSASGSGQVQLVQSGAEVKKPGASVKVSCKASGYTFTSYYIHWVRQAPGQGLEWIGSIYPGNVNTNYNEKFKDRATLTVDTSISTAYMELSRLRSDDTAVYFCTRSHYGLDWNFDVWGQGTTVTVSSGGSSGQVQLVQSGAEVKKPGSSVKVSCKASGYAFSSYWMNWVRQAPGQGLEWMGQIWPGDSDTNYAQKFQGRVTITADESTSTAYMELSSLRSEDTAVYYCARRETTTVGRYYYAMDYWGQGTTVTVSSASGGSGDKTHTCPPCPAPELLGGPSVFLFPPKPKDTLMISRTPEVTCVVVDVSHEDPEVKFNWYVDGVEVHNAKTKPREEQYNSTYRVVSVLTVLHQDWLNGKEYKCKVSNKALPAPIEKTISKAKGQPREPQVYTLPPCRDELTKNQVSLWCLVKGFYPSDIAVEWESNGQPENNYKTTPPVLDSDGSFFLYSKLTVDKSRWQQGNVFSCSVMHEALHNHYTQKSLSLSPG

SEQ ID NO: 323 - protein, 724 aa, synthetic construct
  REGION 1..724: note = Artificial Sequence
DIQMTQSPSSLSASVGDRVTITCHASQNIYVWLNWYQQKPGKAPKLLIYKASNLHTGVPSRFSGSGSGTDFTLTISSLQPEDFATYYCQQGQTYPYTFGGGTKVEIKGGSSGDIQLTQSPSFLSASVGDRVTITCKASQSVDYSGDSYLNWYQQKPGKAPKLLIYDASNLVSGVPSRFSGSGSGTEFTLTISSLQPEDFATYYCQQSTENPWTFGGGTKLEIKGGGGSGGSGSGGGGSASGSGQVQLVQSGAEVKKPGSSVKVSCKASGYAFSSYWMNWVRQAPGQGLEWMGQIWPGDSDTNYAQKFQGRVTITADESTSTAYMELSSLRSEDTAVYYCARRETTTVGRYYYAMDYWGQGTTVTVSSGGSSGQVQLVQSGAEVKKPGASVKVSCKASGYTFTSYYIHWVRQAPGQGLEWIGSIYPGNVNTNYNEKFKDRATLTVDTSISTAYMELSRLRSDDTAVYFCTRSHYGLDWNFDVWGQGTTVTVSSASGGSGDKTHTCPPCPAPEAAGGPSVFLFPPKPKDTLMISRTPEVTCVVVDVSHEDPEVKFNWYVDGVEVHNAKTKPREEQYNSTYRVVSVLTVLHQDWLNGKEYKCKVSNKALAAPIEKTISKAKGQPREPQVYTLPPCRDELTKNQVSLWCLVKGFYPSDIAVEWESNGQPENNYKTTPPVLDSDGSFFLYSKLTVDKSRWQQGNVFSCSVMHEALHNHYTQKSLSLSPG

SEQ ID NO: 324 - protein, 647 aa, synthetic construct
  REGION 1..647: note = Artificial Sequence
LQPEDFATYYCQQGQTYPYTFGGGTKVEIKGGSSGDIQLTQSPSFLSASVGDRVTITCKASQSVDYSGDSYLNWYQQKPGKAPKLLIYDASNLVSGVPSRFSGSGSGTEFTLTISSLQPEDFATYYCQQSTENPWTFGGGTKLEIKGGGGSGGSGSGGGGSASGSGQVQLVQSGAEVKKPGSSVKVSCKASGYAFSSYWMNWVRQAPGQGLEWMGQIWPGDSDTNYAQKFQGRVTITADESTSTAYMELSSLRSEDTAVYYCARRETTTVGRYYYAMDYWGQGTTVTVSSGGSSGQVQLVQSGAEVKKPGASVKVSCKASGYTFTSYYIHWVRQAPGQGLEWIGSIYPGNVNTNYNEKFKDRATLTVDTSISTAYMELSRLRSDDTAVYFCTRSHYGLDWNFDVWGQGTTVTVSSASGGSGDKTHTCPPCPAPELLGGPSVFLFPPKPKDTLMISRTPEVTCVVVDVSHEDPEVKFNWYVDGVEVHNAKTKPREEQYNSTYRVVSVLTVLHQDWLNGKEYKCKVSNKALPAPIEKTISKAKGQPREPQVYTLPPCRDELTKNQVSLWCLVKGFYPSDIAVEWESNGQPENNYKTTPPVLDSDGSFFLYSKLTVDKSRWQQGNVFSCSVMHEALHNHYTQKSLSLSPG

SEQ ID NO: 325 - protein, 716 aa, synthetic construct
  REGION 1..716: note = Artificial Sequence
DIQMTQSPSSLSASVGDRVTITCHASQNIYVWLNWYQQKPGKAPKLLIYKASNLHTGVPSRFSGSGSGTDFTLTISSLQPEDFATYYCQQGQTYPYTFGGGTKVEIKGGSSGEIQLTQSPSSLSASVGDRVTITCRASSSVSYIHWFQQKPGSAPKSLIYATSNLASGVPSRFSGSGSGTDYTLTISSLQPEDFATYYCQQWTSNPPTFGGGTKLEIKGGGGSGGSGSGGGGSASGSGQVQLVQPGAEVKKPGASVKMSCKASGYTFTSYNMHWVRQAPGRGLEWMGAIYPGNGDTSYNQKFQGRVTLTADKSTSTAYMELSSLESEDTAVYYCARSTYYGGDWYFNVWGAGTTVTVSAGGSSGQVQLVQSGAEVKKPGASVKVSCKASGYTFTSYYIHWVRQAPGQGLEWIGSIYPGNVNTNYNEKFKDRATLTVDTSISTAYMELSRLRSDDTAVYFCTRSHYGLDWNFDVWGQGTTVTVSSASGGSGDKTHTCPPCPAPELLGGPSVFLFPPKPKDTLMISRTPEVTCVVVDVSHEDPEVKFNWYVDGVEVHNAKTKPREEQYNSTYRVVSVLTVLHQDWLNGKEYKCKVSNKALPAPIEKTISKAKGQPREPQVYTLPPCRDELTKNQVSLWCLVKGFYPSDIAVEWESNGQPENNYKTTPPVLDSDGSFFLYSKLTVDKSRWQQGNVFSCSVMHEALHNHYTQKSLSLSPG

SEQ ID NO: 326 - protein, 716 aa, synthetic construct; identical to SEQ ID NO: 325
  REGION 1..716: note = Artificial Sequence

SEQ ID NO: 327 - protein, 714 aa, synthetic construct
  REGION 1..714: note = Artificial Sequence
DIQMTQSPSSLSASVGDRVTITCHASQNIYVWLNWYQQKPGKAPKLLIYKASNLHTGVPSRFSGSGSGTDFTLTISSLQPEDFATYYCQQGQTYPYTFGGGTKVEIKGGSSGDIQLTQSPSSLSASVGDRVTITCRASQSISYLNWYQQKPGKSPKRWIYDTSKLASGVPSRFSGSGSGTDYTLTISSMQPEDAATYYCQQWSSNPLTFGGGTKVEIKGGGGSGGSGSGGGGSASGSGQVQLVQSGAEVAKPGASVKVSCKASGYTFTRYTMHWVKQAPGQGLEWIGYINPSRGYTNYAQKFQGKATLTTDKSTSTAYMELSSLRSEDTAVYYCARYYDDHYSLDYWGQGTTLTVSSGGSSGQVQLVQSGAEVKKPGASVKVSCKASGYTFTSYYIHWVRQAPGQGLEWIGSIYPGNVNTNYNEKFKDRATLTVDTSISTAYMELSRLRSDDTAVYFCTRSHYGLDWNFDVWGQGTTVTVSSASGGSGDKTHTCPPCPAPEAAGGPSVFLFPPKPKDTLMISRTPEVTCVVVDVSHEDPEVKFNWYVDGVEVHNAKTKPREEQYNSTYRVVSVLTVLHQDWLNGKEYKCKVSNKALAAPIEKTISKAKGQPREPQVCTLPPSRDELTKNQVSLSCAVKGFYPSDIAVEWESNGQPENNYKTTPPVLDSDGSFFLVSKLTVDKSRWQQGNVFSCSVMHEALHNHYTQKSLSLSPG

SEQ ID NO: 328 - protein, 714 aa, synthetic construct
  REGION 1..714: note = Artificial Sequence
DIQLTQSPSSLSASVGDRVTITCRASQSISYLNWYQQKPGKSPKRWIYDTSKLASGVPSRFSGSGSGTDYTLTISSMQPEDAATYYCQQWSSNPLTFGGGTKVEIKGGSSGDIQMTQSPSSLSASVGDRVTITCHASQNIYVWLNWYQQKPGKAPKLLIYKASNLHTGVPSRFSGSGSGTDFTLTISSLQPEDFATYYCQQGQTYPYTFGGGTKVEIKGGGGSGGSGSGGGGSASGSGQVQLVQSGAEVKKPGASVKVSCKASGYTFTSYYIHWVRQAPGQGLEWIGSIYPGNVNTNYNEKFKDRATLTVDTSISTAYMELSRLRSDDTAVYFCTRSHYGLDWNFDVWGQGTTVTVSSGGSSGQVQLVQSGAEVAKPGASVKVSCKASGYTFTRYTMHWVKQAPGQGLEWIGYINPSRGYTNYAQKFQGKATLTTDKSTSTAYMELSSLRSEDTAVYYCARYYDDHYSLDYWGQGTTLTVSSASGGSGDKTHTCPPCPAPEAAGGPSVFLFPPKPKDTLMISRTPEVTCVVVDVSHEDPEVKFNWYVDGVEVHNAKTKPREEQYNSTYRVVSVLTVLHQDWLNGKEYKCKVSNKALAAPIEKTISKAKGQPREPQVCTLPPSRDELTKNQVSLSCAVKGFYPSDIAVEWESNGQPENNYKTTPPVLDSDGSFFLVSKLTVDKSRWQQGNVFSCSVMHEALHNHYTQKSLSLSPG

SEQ ID NO: 329 - protein, 714 aa, synthetic construct
  REGION 1..714: note = Artificial Sequence
DIQMTQSPSSLSASVGDRVTITCHASQNIYVWLNWYQQKPGKAPKLLIYKASNLHTGVPSRFSGSGSGTDFTLTISSLQPEDFATYYCQQGQTYPYTFGGGTKVEIKGGSSGDIQLTQSPSSLSASVGDRVTITCRASQSISYLNWYQQKPGKSPKRWIYDTSKLASGVPSRFSGSGSGTDYTLTISSMQPEDAATYYCQQWSSNPLTFGGGTKVEIKGGGGSGGSGSGGGGSASGSGQVQLVQSGAEVAKPGASVKVSCKASGYTFTRYTMHWVKQAPGQGLEWIGYINPSRGYTNYAQKFQGKATLTTDKSTSTAYMELSSLRSEDTAVYYCARYYDDHYSLDYWGQGTTLTVSSGGSSGQVQLVQSGAEVKKPGASVKVSCKASGYTFTSYYIHWVRQAPGQGLEWIGSIYPGNVNTNYNEKFKDRATLTVDTSISTAYMELSRLRSDDTAVYFCTRSHYGLDWNFDVWGQGTTVTVSSASGGSGDKTHTCPPCPAPEAAGGPSVFLFPPKPKDTLMISRTPEVTCVVVDVSHEDPEVKFNWYVDGVEVHNAKTKPREEQYNSTYRVVSVLTVLHQDWLNGKEYKCKVSNKALAAPIEKTISKAKGQPREPQVYTLPPSRDELTKNQVSLTCLVKGFYPSDIAVEWESNGQPENNYKTTPPVLDSDGSFFLYSKLTVDKSRWQQGNVFSCSVMHEALHNHYTQKSLSLSPG

SEQ ID NO: 330 - protein, 1153 aa, synthetic construct
  REGION 1..1153: note = Artificial Sequence
DIQMTQSPSSLSASVGDRVTITCHASQNIYVWLNWYQQKPGKAPKLLIYKASNLHTGVPSRFSGSGSGTDFTLTISSLQPEDFATYYCQQGQTYPYTFGGGTKVEIKGGSSGDIQLTQSPSSLSASVGDRVTITCRASQSISYLNWYQQKPGKSPKRWIYDTSKLASGVPSRFSGSGSGTDYTLTISSMQPEDAATYYCQQWSSNPLTFGGGTKVEIKGGGGSGGSGSGGGGSASGSGQVQLVQSGAEVAKPGASVKVSCKASGYTFTRYTMHWVKQAPGQGLEWIGYINPSRGYTNYAQKFQGKATLTTDKSTSTAYMELSSLRSEDTAVYYCARYYDDHYSLDYWGQGTTLTVSSGGSSGQVQLVQSGAEVKKPGASVKVSCKASGYTFTSYYIHWVRQAPGQGLEWIGSIYPGNVNTNYNEKFKDRATLTVDTSISTAYMELSRLRSDDTAVYFCTRSHYGLDWNFDVWGQGTTVTVSSASGGSGDKTHTCPPCPAPEAAGGPSVFLFPPKPKDTLMISRTPEVTCVVVDVSHEDPEVKFNWYVDGVEVHNAKTKPREEQYNSTYRVVSVLTVLHQDWLNGKEYKCKVSNKALAAPIEKTISKAKGQPREPQVCTLPPSRDELTKNQVSLSCAVKGFYPSDIAVEWESNGQPENNYKTTPPVLDSDGSFFLVSKLTVDKSRWQQGNVFSCSVMHEALHNHYTQKSLSLSPGGGSSGSGSGGSGSSGVSHRYSRIQSIKVQFTEYKKEKGFILTSQKEDEIMKVQNNSVIINCDGFYLISLKGYFSQEVNISLHYQKDEEPLFQLKKVRSVNSLMVASLTYKDKVYLNVTTDNTSLDDFHVNGGELILIHQNPGEFCVLGGSGGSGGGSSGSGVSHRYSRIQSIKVQFTEYKKEKGFILTSQKEDEIMKVQNNSVIINCDGFYLISLKGYFSQEVNISLHYQKDEEPLFQLKKVRSVNSLMVASLTYKDKVYLNVTTDNTSLDDFHVNGGELILIHQNPGEFCVLGGSGGSGGGSSGSGVSHRYSRIQSIKVQFTEYKKEKGFILTSQKEDEIMKVQNNSVIINCDGFYLISLKGYFSQEVNISLHYQKDEEPLFQLKKVRSVNSLMVASLTYKDKVYLNVTTDNTSLDDFHVNGGELILIHQNPGEFCVL

SEQ ID NO: 331 - protein, 1153 aa, synthetic construct
  REGION 1..1153: note = Artificial Sequence
DIQLTQSPSSLSASVGDRVTITCRASQSISYLNWYQQKPGKSPKRWIYDTSKLASGVPSRFSGSGSGTDYTLTISSMQPEDAATYYCQQWSSNPLTFGGGTKVEIKGGSSGDIQMTQSPSSLSASVGDRVTITCHASQNIYVWLNWYQQKPGKAPKLLIYKASNLHTGVPSRFSGSGSGTDFTLTISSLQPEDFATYYCQQGQTYPYTFGGGTKVEIKGGGGSGGSGSGGGGSASGSGQVQLVQSGAEVKKPGASVKVSCKASGYTFTSYYIHWVRQAPGQGLEWIGSIYPGNVNTNYNEKFKDRATLTVDTSISTAYMELSRLRSDDTAVYFCTRSHYGLDWNFDVWGQGTTVTVSSGGSSGQVQLVQSGAEVAKPGASVKVSCKASGYTFTRYTMHWVKQAPGQGLEWIGYINPSRGYTNYAQKFQGKATLTTDKSTSTAYMELSSLRSEDTAVYYCARYYDDHYSLDYWGQGTTLTVSSASGGSGDKTHTCPPCPAPEAAGGPSVFLFPPKPKDTLMISRTPEVTCVVVDVSHEDPEVKFNWYVDGVEVHNAKTKPREEQYNSTYRVVSVLTVLHQDWLNGKEYKCKVSNKALAAPIEKTISKAKGQPREPQVCTLPPSRDELTKNQVSLSCAVKGFYPSDIAVEWESNGQPENNYKTTPPVLDSDGSFFLVSKLTVDKSRWQQGNVFSCSVMHEALHNHYTQKSLSLSPGGGSSGSGSGGSGSSGVSHRYSRIQSIKVQFTEYKKEKGFILTSQKEDEIMKVQNNSVIINCDGFYLISLKGYFSQEVNISLHYQKDEEPLFQLKKVRSVNSLMVASLTYKDKVYLNVTTDNTSLDDFHVNGGELILIHQNPGEFCVLGGSGGSGGGSSGSGVSHRYSRIQSIKVQFTEYKKEKGFILTSQKEDEIMKVQNNSVIINCDGFYLISLKGYFSQEVNISLHYQKDEEPLFQLKKVRSVNSLMVASLTYKDKVYLNVTTDNTSLDDFHVNGGELILIHQNPGEFCVLGGSGGSGGGSSGSGVSHRYSRIQSIKVQFTEYKKEKGFILTSQKEDEIMKVQNNSVIINCDGFYLISLKGYFSQEVNISLHYQKDEEPLFQLKKVRSVNSLMVASLTYKDKVYLNVTTDNTSLDDFHVNGGELILIHQNPGEFCVL

SEQ ID NO: 332 - protein, 1153 aa, synthetic construct
  REGION 1..1153: note = Artificial Sequence
DIQMTQSPSSLSASVGDRVTITCHASQNIYVWLNWYQQKPGKAPKLLIYKASNLHTGVPSRFSGSGSGTDFTLTISSLQPEDFATYYCQQGQTYPYTFGGGTKVEIKGGSSGDIQLTQSPSSLSASVGDRVTITCRASQSISYLNWYQQKPGKSPKRWIYDTSKLASGVPSRFSGSGSGTDYTLTISSMQPEDAATYYCQQWSSNPLTFGGGTKVEIKGGGGSGGSGSGGGGSASGSGQVQLVQSGAEVAKPGASVKVSCKASGYTFTRYTMHWVKQAPGQGLEWIGYINPSRGYTNYAQKFQGKATLTTDKSTSTAYMELSSLRSEDTAVYYCARYYDDHYSLDYWGQGTTLTVSSGGSSGQVQLVQSGAEVKKPGASVKVSCKASGYTFTSYYIHWVRQAPGQGLEWIGSIYPGNVNTNYNEKFKDRATLTVDTSISTAYMELSRLRSDDTAVYFCTRSHYGLDWNFDVWGQGTTVTVSSASGGSGDKTHTCPPCPAPEAAGGPSVFLFPPKPKDTLMISRTPEVTCVVVDVSHEDPEVKFNWYVDGVEVHNAKTKPREEQYNSTYRVVSVLTVLHQDWLNGKEYKCKVSNKALAAPIEKTISKAKGQPREPQVYTLPPSRDELTKNQVSLTCLVKGFYPSDIAVEWESNGQPENNYKTTPPVLDSDGSFFLYSKLTVDKSRWQQGNVFSCSVMHEALHNHYTQKSLSLSPGGGSSGSGSGGSGSSGVSHRYSRIQSIKVQFTEYKKEKGFILTSQKEDEIMKVQNNSVIINCDGFYLISLKGYFSQEVNISLHYQKDEEPLFQLKKVRSVNSLMVASLTYKDKVYLNVTTDNTSLDDFHVNGGELILIHQNPGEFCVLGGSGGSGGGSSGSGVSHRYSRIQSIKVQFTEYKKEKGFILTSQKEDEIMKVQNNSVIINCDGFYLISLKGYFSQEVNISLHYQKDEEPLFQLKKVRSVNSLMVASLTYKDKVYLNVTTDNTSLDDFHVNGGELILIHQNPGEFCVLGGSGGSGGGSSGSGVSHRYSRIQSIKVQFTEYKKEKGFILTSQKEDEIMKVQNNSVIINCDGFYLISLKGYFSQEVNISLHYQKDEEPLFQLKKVRSVNSLMVASLTYKDKVYLNVTTDNTSLDDFHVNGGELILIHQNPGEFCVL

SEQ ID NO: 333 - protein, 1153 aa, synthetic construct
  REGION 1..1153: note = Artificial Sequence
DIQLTQSPSSLSASVGDRVTITCRASQSISYLNWYQQKPGKSPKRWIYDTSKLASGVPSRFSGSGSGTDYTLTISSMQPEDAATYYCQQWSSNPLTFGGGTKVEIKGGSSGDIQMTQSPSSLSASVGDRVTITCHASQNIYVWLNWYQQKPGKAPKLLIYKASNLHTGVPSRFSGSGSGTDFTLTISSLQPEDFATYYCQQGQTYPYTFGGGTKVEIKGGGGSGGSGSGGGGSASGSGQVQLVQSGAEVKKPGASVKVSCKASGYTFTSYYIHWVRQAPGQGLEWIGSIYPGNVNTNYNEKFKDRATLTVDTSISTAYMELSRLRSDDTAVYFCTRSHYGLDWNFDVWGQGTTVTVSSGGSSGQVQLVQSGAEVAKPGASVKVSCKASGYTFTRYTMHWVKQAPGQGLEWIGYINPSRGYTNYAQKFQGKATLTTDKSTSTAYMELSSLRSEDTAVYYCARYYDDHYSLDYWGQGTTLTVSSASGGSGDKTHTCPPCPAPEAAGGPSVFLFPPKPKDTLMISRTPEVTCVVVDVSHEDPEVKFNWYVDGVEVHNAKTKPREEQYNSTYRVVSVLTVLHQDWLNGKEYKCKVSNKALAAPIEKTISKAKGQPREPQVYTLPPSRDELTKNQVSLTCLVKGFYPSDIAVEWESNGQPENNYKTTPPVLDSDGSFFLYSKLTVDKSRWQQGNVFSCSVMHEALHNHYTQKSLSLSPGGGSSGSGSGGSGSSGVSHRYSRIQSIKVQFTEYKKEKGFILTSQKEDEIMKVQNNSVIINCDGFYLISLKGYFSQEVNISLHYQKDEEPLFQLKKVRSVNSLMVASLTYKDKVYLNVTTDNTSLDDFHVNGGELILIHQNPGEFCVLGGSGGSGGGSSGSGVSHRYSRIQSIKVQFTEYKKEKGFILTSQKEDEIMKVQNNSVIINCDGFYLISLKGYFSQEVNISLHYQKDEEPLFQLKKVRSVNSLMVASLTYKDKVYLNVTTDNTSLDDFHVNGGELILIHQNPGEFCVLGGSGGSGGGSSGSGVSHRYSRIQSIKVQFTEYKKEKGFILTSQKEDEIMKVQNNSVIINCDGFYLISLKGYFSQEVNISLHYQKDEEPLFQLKKVRSVNSLMVASLTYKDKVYLNVTTDNTSLDDFHVNGGELILIHQNPGEFCVL

SEQ ID NO: 334 - protein, 1285 aa, synthetic construct
  REGION 1..1285: note = Artificial Sequence
DIQMTQSPSSLSASVGDRVTITCHASQNIYVWLNWYQQKPGKAPKLLIYKASNLHTGVPSRFSGSGSGTDFTLTISSLQPEDFATYYCQQGQTYPYTFGGGTKVEIKGGSSGDIQLTQSPSSLSASVGDRVTITCRASQSISYLNWYQQKPGKSPKRWIYDTSKLASGVPSRFSGSGSGTDYTLTISSMQPEDAATYYCQQWSSNPLTFGGGTKVEIKGGGGSGGSGSGGGGSASGSGQVQLVQSGAEVAKPGASVKVSCKASGYTFTRYTMHWVKQAPGQGLEWIGYINPSRGYTNYAQKFQGKATLTTDKSTSTAYMELSSLRSEDTAVYYCARYYDDHYSLDYWGQGTTLTVSSGGSSGQVQLVQSGAEVKKPGASVKVSCKASGYTFTSYYIHWVRQAPGQGLEWIGSIYPGNVNTNYNEKFKDRATLTVDTSISTAYMELSRLRSDDTAVYFCTRSHYGLDWNFDVWGQGTTVTVSSASGGSGDKTHTCPPCPAPEAAGGPSVFLFPPKPKDTLMISRTPEVTCVVVDVSHEDPEVKFNWYVDGVEVHNAKTKPREEQYNSTYRVVSVLTVLHQDWLNGKEYKCKVSNKALAAPIEKTISKAKGQPREPQVCTLPPSRDELTKNQVSLSCAVKGFYPSDIAVEWESNGQPENNYKTTPPVLDSDGSFFLVSKLTVDKSRWQQGNVFSCSVMHEALHNHYTQKSLSLSPGGGSGSGGGSGLREGPELSPDDPAGLLDLRQGMFAQLVAQNVLLIDGPLSWYSDPGLAGVSLTGGLSYKEDTKELVVAKAGVYYVFFQLELRRVVAGEGSGSVSLALHLQPLRSAAGAAALALTVDLPPASSEARNSAFGFQGRLLHLSAGQRLGVHLHTEARARHAWQLTQGATVLGLFRVTPEIPAGLPSPRSEGSLREGPELSPDDPAGLLDLRQGMFAQLVAQNVLLIDGPLSWYSDPGLAGVSLTGGLSYKEDTKELVVAKAGVYYVFFQLELRRVVAGEGSGSVSLALHLQPLRSAAGAAALALTVDLPPASSEARNSAFGFQGRLLHLSAGQRLGVHLHTEARARHAWQLTQGATVLGLFRVTPEIPAGLPSPRSEGSLREGPELSPDDPAGLLDLRQGMFAQLVAQNVLLIDGPLSWYSDPGLAGVSLTGGLSYKEDTKELVVAKAGVYYVFFQLELRRVVAGEGSGSVSLALHLQPLRSAAGAAALALTVDLPPASSEARNSAFGFQGRLLHLSAGQRLGVHLHTEARARHAWQLTQGATVLGLFRVTPEIPAGLPSPRSEGS

SEQ ID NO: 335 - protein, 1285 aa, synthetic construct
  REGION 1..1285: note = Artificial Sequence
DIQLTQSPSSLSASVGDRVTITCRASQSISYLNWYQQKPGKSPKRWIYDTSKLASGVPSRFSGSGSGTDYTLTISSMQPEDAATYYCQQWSSNPLTFGGGTKVEIKGGSSGDIQMTQSPSSLSASVGDRVTITCHASQNIYVWLNWYQQKPGKAPKLLIYKASNLHTGVPSRFSGSGSGTDFTLTISSLQPEDFATYYCQQGQTYPYTFGGGTKVEIKGGGGSGGSGSGGGGSASGSGQVQLVQSGAEVKKPGASVKVSCKASGYTFTSYYIHWVRQAPGQGLEWIGSIYPGNVNTNYNEKFKDRATLTVDTSISTAYMELSRLRSDDTAVYFCTRSHYGLDWNFDVWGQGTTVTVSSGGSSGQVQLVQSGAEVAKPGASVKVSCKASGYTFTRYTMHWVKQAPGQGLEWIGYINPSRGYTNYAQKFQGKATLTTDKSTSTAYMELSSLRSEDTAVYYCARYYDDHYSLDYWGQGTTLTVSSASGGSGDKTHTCPPCPAPEAAGGPSVFLFPPKPKDTLMISRTPEVTCVVVDVSHEDPEVKFNWYVDGVEVHNAKTKPREEQYNSTYRVVSVLTVLHQDWLNGKEYKCKVSNKALAAPIEKTISKAKGQPREPQVCTLPPSRDELTKNQVSLSCAVKGFYPSDIAVEWESNGQPENNYKTTPPVLDSDGSFFLVSKLTVDKSRWQQGNVFSCSVMHEALHNHYTQKSLSLSPGGGSGSGGGSGLREGPELSPDDPAGLLDLRQGMFAQLVAQNVLLIDGPLSWYSDPGLAGVSLTGGLSYKEDTKELVVAKAGVYYVFFQLELRRVVAGEGSGSVSLALHLQPLRSAAGAAALALTVDLPPASSEARNSAFGFQGRLLHLSAGQRLGVHLHTEARARHAWQLTQGATVLGLFRVTPEIPAGLPSPRSEGSLREGPELSPDDPAGLLDLRQGMFAQLVAQNVLLIDGPLSWYSDPGLAGVSLTGGLSYKEDTKELVVAKAGVYYVFFQLELRRVVAGEGSGSVSLALHLQPLRSAAGAAALALTVDLPPASSEARNSAFGFQGRLLHLSAGQRLGVHLHTEARARHAWQLTQGATVLGLFRVTPEIPAGLPSPRSEGSLREGPELSPDDPAGLLDLRQGMFAQLVAQNVLLIDGPLSWYSDPGLAGVSLTGGLSYKEDTKELVVAKAGVYYVFFQLELRRVVAGEGSGSVSLALHLQPLRSAAGAAALALTVDLPPASSEARNSAFGFQGRLLHLSAGQRLGVHLHTEARARHAWQLTQGATVLGLFRVTPEIPAGLPSPRSEGS

SEQ ID NO: 336 - protein, 1285 aa, synthetic construct
  REGION 1..1285: note = Artificial Sequence
DIQMTQSPSSLSASVGDRVTITCHASQNIYVWLNWYQQKPGKAPKLLIYKASNLHTGVPSRFSGSGSGTDFTLTISSLQPEDFATYYCQQGQTYPYTFGGGTKVEIKGGSSGDIQLTQSPSSLSASVGDRVTITCRASQSISYLNWYQQKPGKSPKRWIYDTSKLASGVPSRFSGSGSGTDYTLTISSMQPEDAATYYCQQWSSNPLTFGGGTKVEIKGGGGSGGSGSGGGGSASGSGQVQLVQSGAEVAKPGASVKVSCKASGYTFTRYTMHWVKQAPGQGLEWIGYINPSRGYTNYAQKFQGKATLTTDKSTSTAYMELSSLRSEDTAVYYCARYYDDHYSLDYWGQGTTLTVSSGGSSGQVQLVQSGAEVKKPGASVKVSCKASGYTFTSYYIHWVRQAPGQGLEWIGSIYPGNVNTNYNEKFKDRATLTVDTSISTAYMELSRLRSDDTAVYFCTRSHYGLDWNFDVWGQGTTVTVSSASGGSGDKTHTCPPCPAPEAAGGPSVFLFPPKPKDTLMISRTPEVTCVVVDVSHEDPEVKFNWYVDGVEVHNAKTKPREEQYNSTYRVVSVLTVLHQDWLNGKEYKCKVSNKALAAPIEKTISKAKGQPREPQVYTLPPSRDELTKNQVSLTCLVKGFYPSDIAVEWESNGQPENNYKTTPPVLDSDGSFFLYSKLTVDKSRWQQGNVFSCSVMHEALHNHYTQKSLSLSPGGGSGSGGGSGLREGPELSPDDPAGLLDLRQGMFAQLVAQNVLLIDGPLSWYSDPGLAGVSLTGGLSYKEDTKELVVAKAGVYYVFFQLELRRVVAGEGSGSVSLALHLQPLRSAAGAAALALTVDLPPASSEARNSAFGFQGRLLHLSAGQRLGVHLHTEARARHAWQLTQGATVLGLFRVTPEIPAGLPSPRSEGSLREGPELSPDDPAGLLDLRQGMFAQLVAQNVLLIDGPLSWYSDPGLAGVSLTGGLSYKEDTKELVVAKAGVYYVFFQLELRRVVAGEGSGSVSLALHLQPLRSAAGAAALALTVDLPPASSEARNSAFGFQGRLLHLSAGQRLGVHLHTEARARHAWQLTQGATVLGLFRVTPEIPAGLPSPRSEGSLREGPELSPDDPAGLLDLRQGMFAQLVAQNVLLIDGPLSWYSDPGLAGVSLTGGLSYKEDTKELVVAKAGVYYVFFQLELRRVVAGEGSGSVSLALHLQPLRSAAGAAALALTVDLPPASSEARNSAFGFQGRLLHLSAGQRLGVHLHTEARARHAWQLTQGATVLGLFRVTPEIPAGLPSPRSEGS

SEQ ID NO: 337 - protein, 1285 aa, synthetic construct
  REGION 1..1285: note = Artificial Sequence
DIQLTQSPSSLSASVGDRVTITCRASQSISYLNWYQQKPGKSPKRWIYDTSKLASGVPSRFSGSGSGTDYTLTISSMQPEDAATYYCQQWSSNPLTFGGGTKVEIKGGSSGDIQMTQSPSSLSASVGDRVTITCHASQNIYVWLNWYQQKPGKAPKLLIYKASNLHTGVPSRFSGSGSGTDFTLTISSLQPEDFATYYCQQGQTYPYTFGGGTKVEIKGGGGSGGSGSGGGGSASGSGQVQLVQSGAEVKKPGASVKVSCKASGYTFTSYYIHWVRQAPGQGLEWIGSIYPGNVNTNYNEKFKDRATLTVDTSISTAYMELSRLRSDDTAVYFCTRSHYGLDWNFDVWGQGTTVTVSSGGSSGQVQLVQSGAEVAKPGASVKVSCKASGYTFTRYTMHWVKQAPGQGLEWIGYINPSRGYTNYAQKFQGKATLTTDKSTSTAYMELSSLRSEDTAVYYCARYYDDHYSLDYWGQGTTLTVSSASGGSGDKTHTCPPCPAPEAAGGPSVFLFPPKPKDTLMISRTPEVTCVVVDVSHEDPEVKFNWYVDGVEVHNAKTKPREEQYNSTYRVVSVLTVLHQDWLNGKEYKCKVSNKALAAPIEKTISKAKGQPREPQVYTLPPSRDELTKNQVSLTCLVKGFYPSDIAVEWESNGQPENNYKTTPPVLDSDGSFFLYSKLTVDKSRWQQGNVFSCSVMHEALHNHYTQKSLSLSPGGGSGSGGGSGLREGPELSPDDPAGLLDLRQGMFAQLVAQNVLLIDGPLSWYSDPGLAGVSLTGGLSYKEDTKELVVAKAGVYYVFFQLELRRVVAGEGSGSVSLALHLQPLRSAAGAAALALTVDLPPASSEARNSAFGFQGRLLHLSAGQRLGVHLHTEARARHAWQLTQGATVLGLFRVTPEIPAGLPSPRSEGSLREGPELSPDDPAGLLDLRQGMFAQLVAQNVLLIDGPLSWYSDPGLAGVSLTGGLSYKEDTKELVVAKAGVYYVFFQLELRRVVAGEGSGSVSLALHLQPLRSAAGAAALALTVDLPPASSEARNSAFGFQGRLLHLSAGQRLGVHLHTEARARHAWQLTQGATVLGLFRVTPEIPAGLPSPRSEGSLREGPELSPDDPAGLLDLRQGMFAQLVAQNVLLIDGPLSWYSDPGLAGVSLTGGLSYKEDTKELVVAKAGVYYVFFQLELRRVVAGEGSGSVSLALHLQPLRSAAGAAALALTVDLPPASSEARNSAFGFQGRLLHLSAGQRLGVHLHTEARARHAWQLTQGATVLGLFRVTPEIPAGLPSPRSEGS

SEQ ID NO: 338 - protein, 132 aa, synthetic construct
  REGION 1..132: note = Artificial Sequence
QMQLQESGPGLVKPSETLSLTCSVSGASISDSYWSWIRRSPGKGLEWIGYVHKSGDTNYSPSLKSRVNLSLDTSKNQVSLSLVAATAADSGKYYCARTLHGRRIYGIVAFNEWFTYFYMDVWGNGTQVTVSS

SEQ ID NO: 339 - protein, 121 aa, synthetic construct
  REGION 1..121: note = Artificial Sequence
QVQLVQSGGQMKKPGESMRISCRASGYEFIDCTLNWIRLAPGKRPEWMGWLKPRGGAVNYARPLQGRVTMTRDVYSDTAFLELRSLTVDDTAVYFCTRGKNCDYNWDFEHWGRGTPVIVSS

SEQ ID NO: 340 - protein, 131 aa, synthetic construct
  REGION 1..131: note = Artificial Sequence
EVRLVESGGGLVKPGGSLRLSCSASGFDFDNAWMTWVRQPPGKGLEWVGRITGPGEGWSVDYAESVKGRFTISRDNTKNTLYLEMNNVRTEDTGYYFCARTGKYYDFWSGYPPGEEYFQDWGQGTLVIVSS

SEQ ID NO: 341 - protein, 137 aa, synthetic construct
  REGION 1..137: note = Artificial Sequence
QEQLVESGGGVVQPGGSLRLSCLASGFTFHKYGMHWVRQAPGKGLEWVALISDDGMRKYHSDSMWGRVTISRDNSKNTLYLQFSSLKVEDTAMFFCAREAGGPIWHDDVKYYDFNDGYYNYHYMDVWGKGTTVTVSS

SEQ ID NO: 342 - protein, 105 aa, synthetic construct
  REGION 1..105: note = Artificial Sequence
SDISVAPGETARISCGEKSLGSRAVQWYQHRAGQAPSLIIYNNQDRPSGIPERFSGSPDSPFGTTATLTITSVEAGDEADYYCHIWDSRVPTKWVFGGGTTLTVL

SEQ ID NO: 343 - protein, 100 aa, synthetic construct
  REGION 1..100: note = Artificial Sequence
LTQSPGTLSLSPGETAIISCRTSQYGSLAWYQQRPGQAPRLVIYSGSTRAAGIPDRFSGSRWGPDYNLTISNLESGDFGVYYCQQYEFFGQGTKVQVDIK

SEQ ID NO: 344 - protein, 108 aa, synthetic construct
  REGION 1..108: note = Artificial Sequence
SELTQDPAVSVALKQTVTITCRGDSLRSHYASWYQKKPGQAPVLLFYGKNNRPSGIPDRFSGSASGNRASLTITGAQAEDEADYYCSSRDKSGSRLSVFGGGTKLTVL

SEQ ID NO: 345 - protein, 110 aa, synthetic construct
  REGION 1..110: note = Artificial Sequence
QSALTQPASVSGSPGQTITISCNGTSSDVGGFDSVSWYQQSPGKAPKVMVFDVSHRPSGISNRFSGSKSGNTASLTISGLHIEDEGDYFCSSLTDRSHRIFGGGTKVTVL

SEQ ID NO: 346 - protein, 241 aa, synthetic construct
  REGION 1..241: note = Artificial Sequence
LTQSPGTLSLSPGETAIISCRTSQYGSLAWYQQRPGQAPRLVIYSGSTRAAGIPDRFSGSRWGPDYNLTISNLESGDFGVYYCQQYEFFGQGTKVQVDIKGGGGSGGSGSGGGGSASGSGQVQLVQSGGQMKKPGESMRISCRASGYEFIDCTLNWIRLAPGKRPEWMGWLKPRGGAVNYARPLQGRVTMTRDVYSDTAFLELRSLTVDDTAVYFCTRGKNCDYNWDFEHWGRGTPVIVSS

SEQ ID NO: 347 - DNA, 1428 bp, synthetic construct
  misc_feature 1..1428: note = Artificial Sequence
  source 1..1428: mol_type = other DNA
gagatcgtgctgacacagagccctggcaccctgagcctgtctccaggcgagacagccatcatcagctgccggacaagccagtacggcagcctggcctggtatcagcagaggcctggacaggcccccagactcgtgatctacagcggcagcacaagagccgccggaatccccgatagattcagcggctccagatggggccctgactacaacctgaccatcagcaacctggaaagcggcgacttcggcgtgtactactgccagcagtacgagttcttcggccagggcaccaaggtgcaggtggacatcaagggcggcggaggaagcggcggatctggatctggtggcggaggatctgcttctggctctggacaggttcagctggttcagtctggcggacagatgaagaaacccggcgagagcatgcggatcagctgtagagccagcggctacgagttcatcgactgcaccctgaactggatcagactggcccctggcaaaagacccgagtggatgggatggctgaagcctagaggcggagccgtgaattacgccagacctctgcagggcagagtgaccatgaccagggacgtgtacagcgataccgccttcctggaactgagaagcctgaccgtggatgataccgccgtgtacttctgcacccggggcaagaactgcgactacaactgggacttcgagcactggggcagaggcacacctgtgatcgttagctctgctagcggaggttccggagataagacccacacatgtcctccatgtcctgctccagaactgctgggcggaccttccgtgtttctgttccctccaaagcctaaggacaccctgatgatcagcaggacccctgaagtgacctgcgtggtggtggatgtgtctcacgaggacccagaagtgaagttcaattggtacgtggacggcgtggaagtgcacaacgccaagaccaagcctagagaggaacagtacaacagcacctacagagtggtgtccgtgctgacagtgctgcaccaggattggctgaacggcaaagagtacaagtgcaaggtgtccaacaaggccctgcccgcccctatcgagaaaaccatcagcaaggccaagggccagcctagggaaccccaggtttacacccttcctccatgccgggatgagctgaccaagaaccaggtgtccctgtggtgtctggtcaagggcttctaccccagcgacattgccgtggaatgggagagcaatggccagcctgagaacaactacaagaccacacctcctgtgctggactccgacggatcattcttcctgtacagcaagctgactgtggacaagagcagatggcagcagggcaacgtgttcagctgcagcgtgatgcacgaggccctgcacaaccactacacacagaagtccctgtctctgagccctggc

SEQ ID NO: 348 - protein, 259 aa, synthetic construct
  REGION 1..259: note = Artificial Sequence
SELTQDPAVSVALKQTVTITCRGDSLRSHYASWYQKKPGQAPVLLFYGKNNRPSGIPDRFSGSASGNRASLTITGAQAEDEADYYCSSRDKSGSRLSVFGGGTKLTVLGGGGSGGSGSGGGGSASGSGEVRLVESGGGLVKPGGSLRLSCSASGFDFDNAWMTWVRQPPGKGLEWVGRITGPGEGWSVDYAESVKGRFTISRDNTKNTLYLEMNNVRTEDTGYYFCARTGKYYDFWSGYPPGEEYFQDWGQGTLVIVSS

SEQ ID NO: 349 - DNA, 1473 bp, synthetic construct
  misc_feature 1..1473: note = Artificial Sequence
  source 1..1473: mol_type = other DNA
agcgaactgacccaagatcctgccgtgtctgtggccctgaagcagaccgtgaccatcacctgtagaggcgacagcctgagaagccactacgccagctggtatcagaagaagcctggacaggctcccgtgctgctgttctacggcaagaacaacagacccagcggcatccccgatagattttctggcagcgccagcggcaatagagccagcctgacaattactggcgcccaggccgaagatgaggccgactactactgcagcagcagagacaagagcggcagcagactgtccgtttttggcggaggcaccaagctgaccgtgctgggcggcggaggaagcggcggatctggatctggtggcggaggatctgcttctggctctggagaagttcggctggtggaatctggcggcggacttgtgaaacctggcggctctctgagactgagctgtagcgcctccggcttcgacttcgacaatgcctggatgacctgggtccgacagcctcctggaaaaggcctggaatgggtcggaagaatcacaggccctggcgaaggctggagtgtggattatgccgagagcgtgaagggcagattcaccatcagccgggacaacaccaagaacaccctgtacctggaaatgaacaacgtgcggaccgaggataccggctactacttctgtgcccggaccggcaagtactacgacttttggagcggctaccctcctggcgaggaatactttcaggattggggccagggcaccctggtcatcgtttcttctgctagcggaggttccggagataagacccacacatgtcctccatgtcctgctccagaactgctgggcggaccttccgtgtttctgttccctccaaagcctaaggacaccctgatgatcagcaggacccctgaagtgacctgcgtggtggtggatgtgtctcacgaggacccagaagtgaagttcaattggtacgtggacggcgtggaagtgcacaacgccaagaccaagcctagagaggaacagtacaacagcacctacagagtggtgtccgtgctgacagtgctgcaccaggattggctgaacggcaaagagtacaagtgcaaggtgtccaacaaggccctgcccgcccctatcgagaaaaccatcagcaaggccaagggccagcctagggaaccccaggtttacacccttcctccatgccgggatgagctgaccaagaaccaggtgtccctgtggtgtctggtcaagggcttctaccccagcgacattgccgtggaatgggagagcaatggccagcctgagaacaactacaagaccacacctcctgtgctggactccgacggatcattcttcctgtacagcaagctgactgtggacaagagcagatggcagcagggcaacgtgttcagctgcagcgtgatgcacgaggccctgcacaaccactacacacagaagtccctgtctctgagccctggc

SEQ ID NO: 350 - DNA, 2169 bp, synthetic construct
  misc_feature 1..2169: note = Artificial Sequence
  source 1..2169: mol_type = other DNA
agcgatatctctgtggcccctggcgagacagccagaatcagctgtggcgagaagtccctgggaagcagagccgtgcagtggtatcagcatagagccggacaggcccctagcctgatcatctacaacaaccaggacagacccagcggcatccccgagagattttctggcagccctgatagccctttcggcaccacagccacactgaccatcacatctgtggaagccggcgacgaggccgactactactgtcacatctgggacagcagggtgcccaccaaatgggttttcggcggaggcacaaccctgaccgttctgggcggatcttctggagagatcgtgctgacacagagccctggcaccctgagcctgtctccaggcgagacagccatcatcagctgccggacaagccagtacggcagcctggcctggtatcagcagaggcctggacaggcccccagactcgtgatctacagcggcagcacaagagccgccggaatccccgatagattcagcggctccagatggggccctgactacaacctgaccatcagcaacctggaaagcggcgacttcggcgtgtactactgccagcagtacgagttcttcggccagggcaccaaggtgcaggtggacatcaagggaggcggaggatctggcggatctggaagtggcggcggtggatctgcttctggctctggccaggttcagctggttcagtctggcggacagatgaagaaacccggcgagagcatgcggatcagctgtagagccagcggctacgagttcatcgactgcaccctgaactggatcagactggcccctggcaaaagacccgagtggatgggatggctgaagcctagaggcggagccgtgaattacgccagacctctgcagggcagagtgaccatgaccagggacgtgtacagcgataccgccttcctggaactgagaagcctgaccgtggatgataccgccgtgtacttctgcacccggggcaagaactgcgactacaactgggacttcgagcactggggcagaggcacacctgtgatcgttagctctggcggatcttctggacagatgcagctccaagagtctggccctggcctggtcaagcctagcgaaacactgagcctgacctgttccgtgtccggcgccagcatcagcgatagctactggtcctggatcagaagaagccccggcaaaggcctggaatggatcggctacgtgcacaagagcggcgacaccaactatagccccagcctgaagtccagagtgaacctgagcctggacaccagcaagaaccaggtgtccctgtctctggtggccgctacagctgccgatagcggcaagtactactgcgccagaactctgcacggcagacggatctatggcatcgtggccttcaacgagtggttcacctacttctacatggacgtgtggggcaacggcacccaagtgacagtctcttctgcaagcggaggctccggagataagacccacacatgtcctccatgtcctgctccagagctgctgggtggcccttccgtgtttctgttccctccaaagcctaaggacaccctgatgatcagcaggacccctgaagtgacctgcgtggtggtggatgtgtctcacgaggacccagaagtgaagttcaattggtacgtggacggcgtggaagtgcacaacgccaagaccaagcctagagaggaacagtacaacagcacctacagagtggtgtccgtgctgaccgtgctgcaccaggattggctgaacggcaaagagtacaagtgcaaggtgtccaacaaggccctgcccgctcctatcgagaaaaccatcagcaaggccaagggccagcctcgcgaacctcaagtctgtacactgcctcctagccgggacgagctgaccaagaatcaggtgtcactgagctgcgccgtgaagggcttttaccccagcgacattgccgtggaatgggagagcaatggccagccagagaacaactacaagacaacccctcctgtgctggacagcgacggctcatttttcctggtgtccaagctgacagtggacaagagcagatggcagcagggcaacgtgttcagctgcagcgtgatgcacgaggccctgcacaaccactacacccagaaaagcctgtctctgagccctggc

SEQ ID NO: 351 - DNA, 2169 bp, synthetic construct
  misc_feature 1..2169: note = Artificial Sequence
  source 1..2169: mol_type = other DNA
gagatcgtgctgacacagagccctggcaccctgagcctgtctccaggcgagacagccatcatcagctgccggacaagccagtacggcagcctggcctggtatcagcagaggcctggacaggcccccagactcgtgatctacagcggcagcacaagagccgccggaatccccgatagattcagcggctccagatggggccctgactacaacctgaccatcagcaacctggaaagcggcgacttcggcgtgtactactgccagcagtacgagttcttcggccagggcaccaaggtgcaggtggacatcaagggcggatcttctggaagcgatatctctgtggcccctggcgagacagccagaatcagctgtggcgagaagtccctgggaagcagagccgtgcagtggtatcagcatagagccggacaggcccctagcctgatcatctacaacaaccaggacagacccagcggcatccccgagagattttctggcagccctgatagccctttcggcaccacagccacactgaccatcacatctgtggaagccggcgacgaggccgactactactgtcacatctgggacagcagggtgcccaccaaatgggttttcggcggaggcacaaccctgaccgttctgggaggcggaggatctggcggatctggaagtggcggcggtggatctgcttctggctctggccagatgcagctccaagagtctggccctggcctggtcaagcctagcgaaacactgagcctgacctgttccgtgtccggcgccagcatcagcgatagctactggtcctggatcagaagaagccccggcaaaggcctggaatggatcggctacgtgcacaagagcggcgacaccaactatagccccagcctgaagtccagagtgaacctgagcctggacaccagcaagaaccaggtgtccctgtctctggtggccgctacagctgccgatagcggcaagtactactgcgccagaactctgcacggcagacggatctatggcatcgtggccttcaacgagtggttcacctacttctacatggacgtgtggggcaacggcacccaagtgacagtctcttctggcggatcttctggacaggttcagctggttcagtctggcggacagatgaagaaacccggcgagagcatgcggatcagctgtagagccagcggctacgagttcatcgactgcaccctgaactggatcagactggcccctggcaaaagacccgagtggatgggatggctgaagcctagaggcggagccgtgaattacgccagacctctgcagggcagagtgaccatgaccagggacgtgtacagcgataccgccttcctggaactgagaagcctgaccgtggatgataccgccgtgtacttctgcacccggggcaagaactgcgactacaactgggacttcgagcactggggcagaggcacacctgtgatcgttagctctgcaagcggaggctccggagataagacccacacatgtcctccatgtcctgctccagagctgctgggtggcccttccgtgtttctgttccctccaaagcctaaggacaccctgatgatcagcaggacccctgaagtgacctgcgtggtggtggatgtgtctcacgaggacccagaagtgaagttcaattggtacgtggacggcgtggaagtgcacaacgccaagaccaagcctagagaggaacagtacaacagcacctacagagtggtgtccgtgctgaccgtgctgcaccaggattggctgaacggcaaagagtacaagtgcaaggtgtccaacaaggccctgcccgctcctatcgagaaaaccatcagcaaggccaagggccagcctcgcgaacctcaagtctgtacactgcctcctagccgggacgagctgaccaagaatcaggtgtcactgagctgcgccgtgaagggcttttaccccagcgacattgccgtggaatgggagagcaatggccagccagagaacaactacaagacaacccctcctgtgctggacagcgacggctcatttttcctggtgtccaagctgacagtggacaagagcagatggcagcagggcaacgtgttcagctgcagcgtgatgcacgaggccctgcacaaccactacacccagaaaagcctgtctctgagccctggc

SEQ ID NO: 352 - DNA, 2244 bp, synthetic construct
  misc_feature 1..2244: note = Artificial Sequence
  source 1..2244: mol_type = other DNA
agcgaactgacccaagatcctgccgtgtctgtggccctgaagcagaccgtgaccatcacctgtagaggcgacagcctgagaagccactacgccagctggtatcagaagaagcctggacaggctcccgtgctgctgttctacggcaagaacaacagacccagcggcatccccgatagattttctggcagcgccagcggcaatagagccagcctgacaattactggcgcccaggccgaagatgaggccgactactactgcagcagcagagacaagagcggcagcagactgtccgtttttggcggaggcaccaagctgaccgtgctgggcggatcttctggacagtctgctctgacacagcctgcctctgtgtctggctctcctggccagaccatcaccatcagctgtaacggcaccagctctgacgtcggcggctttgatagcgtgtcctggtatcagcagagccccggcaaagcccctaaagtgatggtgttcgatgtgtcccaccggcctagcggcatcagcaatagattcagcggcagcaagagcggcaacaccgccagcctgacaatctctggactgcacatcgaggacgagggcgactacttctgtagcagcctgaccgacagaagccaccggatttttggcggaggcaccaaagtgaccgtgctgggaggcggaggatctggcggatctggaagtggcggcggtggatctgcttctggctctggccaagaacagctggtggaatctggtggcggagtggttcaacctggcggctctctgagactgagctgtctggcctccggcttcaccttccacaaatacggcatgcactgggtccgacaggcccctggaaaaggccttgaatgggtcgccctgatcagcgacgacggcatgagaaagtaccacagcgacagcatgtggggcagagtgaccatcagccgggacaacagcaagaacaccctgtacctgcagttcagctccctgaaggtggaagataccgccatgttcttttgcgccagagaagccggcggacccatctggcatgacgacgtgaagtactacgacttcaacgacggctactacaactaccactacatggacgtgtggggcaagggcaccaccgtgacagtttcttctggcggatcttctggagaagttcggctggtggaatctggcggcggacttgtgaaacctggcggctctctgagactgagctgtagcgcctccggcttcgacttcgacaatgcctggatgacctgggtccgacagcctcctggaaaaggcctggaatgggtcggaagaatcacaggccctggcgaaggctggagtgtggattatgccgagagcgtgaagggcagattcaccatcagccgggacaacaccaagaacaccctgtacctggaaatgaacaacgtgcggaccgaggataccggctactacttctgtgcccggaccggcaagtactacgacttttggagcggctaccctcctggcgaggaatactttcaggattggggccagggcaccctggtcatcgtttcttctgcaagcggaggctccggagataagacccacacatgtcctccatgtcctgctccagaactgctgggcggaccttccgtgtttctgttccctccaaagcctaaggacaccctgatgatcagcaggacccctgaagtgacctgcgtggtggtggatgtgtctcacgaggacccagaagtgaagttcaattggtacgtggacggcgtggaagtgcacaacgccaagaccaagcctagagaggaacagtacaacagcacctacagagtggtgtccgtgctgacagtgctgcaccaggattggctgaacggcaaagagtacaagtgcaaggtgtccaacaaggccctgcccgcccctatcgagaaaaccatcagcaaggccaagggccagcctagggaaccccaggtttacacccttcctccatgccgggatgagctgaccaagaaccaggtgtccctgtggtgtctggtcaagggcttctaccccagcgacattgccgtggaatgggagagcaatggccagcctgagaacaactacaagaccacacctcctgtgctggactccgacggatcattcttcctgtacagcaagctgactgtggacaagagcagatggcagcagggcaacgtgttcagctgcagcgtgatgcacgaggccctgcacaaccactacacacagaagtccctgtctctgagccctggc

SEQ ID NO: 353 - DNA, 2244 bp, synthetic construct
  misc_feature 1..2244: note = Artificial Sequence
  source 1..2244: mol_type = other DNA
cagtctgctctgacacagcctgcctctgtgtctggctctcctggccagaccatcaccatcagctgtaacggcaccagctctgacgtcggcggctttgatagcgtgtcctggtatcagcagagccccggcaaagcccctaaagtgatggtgttcgatgtgtcccaccggcctagcggcatcagcaatagattcagcggcagcaagagcggcaacaccgccagcctgacaatctctggactgcacatcgaggacgagggcgactacttctgtagcagcctgaccgacagaagccaccggatttttggcggaggcaccaaagtgaccgtgctgggcggatcttctggaagcgaactgacccaagatcctgccgtgtctgtggccctgaagcagaccgtgaccatcacctgtagaggcgacagcctgagaagccactacgccagctggtatcagaagaagcctggacaggctcccgtgctgctgttctacggcaagaacaacagacccagcggcatccccgatagattttctggcagcgccagcggcaatagagccagcctgacaattactggcgcccaggccgaagatgaggccgactactactgcagcagcagagacaagagcggcagcagactgtccgtttttggcggaggcaccaagctgaccgtgctgggaggcggaggatctggcggatctggaagtggcggcggtggatctgcttctggctctggcgaagttcggctggtggaatctggcggcggacttgtgaaacctggcggctctctgagactgagctgtagcgcctccggcttcgacttcgacaatgcctggatgacctgggtccgacagcctcctggaaaaggcctggaatgggtcggaagaatcacaggccctggcgaaggctggagtgtggattatgccgagagcgtgaagggcagattcaccatcagccgggacaacaccaagaacaccctgtacctggaaatgaacaacgtgcggaccgaggataccggctactacttctgtgcccggaccggcaagtactacgacttttggagcggctaccctcctggcgaggaatactttcaggattggggccagggcaccctggtcatcgtttcttctggcggatcttctggacaagaacagctggtggaatctggtggcggagtggttcaacctggcggctctctgagactgagctgtctggcctccggcttcaccttccacaaatacggcatgcactgggtccgacaggcccctggaaaaggccttgaatgggtcgccctgatcagcgacgacggcatgagaaagtaccacagcgacagcatgtggggcagagtgaccatcagccgggacaacagcaagaacaccctgtacctgcagttcagctccctgaaggtggaagataccgccatgttcttttgcgccagagaagccggcggacccatctggcatgacgacgtgaagtactacgacttcaacgacggctactacaactaccactacatggacgtgtggggcaagggcaccaccgtgacagtttcttctgcaagcggaggctccggagataagacccacacatgtcctccatgtcctgctccagaactgctgggcggaccttccgtgtttctgttccctccaaagcctaaggacaccctgatgatcagcaggacccctgaagtgacctgcgtggtggtggatgtgtctcacgaggacccagaagtgaagttcaattggtacgtggacggcgtggaagtgcacaacgccaagaccaagcctagagaggaacagtacaacagcacctacagagtggtgtccgtgctgacagtgctgcaccaggattggctgaacggcaaagagtacaagtgcaaggtgtccaacaaggccctgcccgcccctatcgagaaaaccatcagcaaggccaagggccagcctagggaaccccaggtttacacccttcctccatgccgggatgagctgaccaagaaccaggtgtccctgtggtgtctggtcaagggcttctaccccagcgacattgccgtggaatgggagagcaatggccagcctgagaacaactacaagaccacacctcctgtgctggactccgacggatcattcttcctgtacagcaagctgactgtggacaagagcagatggcagcagggcaacgtgttcagctgcagcgtgatgcacgaggccctgcacaaccactacacacagaagtccctgtctctgagccctggc

SEQ ID NO: 354 - DNA, 2214 bp, synthetic construct
  misc_feature 1..2214: note = Artificial Sequence
  source 1..2214: mol_type = other DNA
agcgatatctctgtggcccctggcgagacagccagaatcagctgtggcgagaagtccctgggaagcagagccgtgcagtggtatcagcatagagccggacaggcccctagcctgatcatctacaacaaccaggacagacccagcggcatccccgagagattttctggcagccctgatagccctttcggcaccacagccacactgaccatcacatctgtggaagccggcgacgaggccgactactactgtcacatctgggacagcagggtgcccaccaaatgggttttcggcggaggcacaaccctgaccgttctgggcggatcttctggaagcgaactgacccaagatcctgccgtgtctgtggccctgaagcagaccgtgaccatcacctgtagaggcgacagcctgagaagccactacgccagctggtatcagaagaagcctggacaggctcccgtgctgctgttctacggcaagaacaacagacccagcggcatccccgatagattttctggcagcgccagcggcaatagagccagcctgacaattactggcgcccaggccgaagatgaggccgactactactgcagcagcagagacaagagcggcagcagactgtccgtttttggcggaggcaccaagctgaccgtgctgggaggcggaggatctggcggatctggaagtggcggcggtggatctgcttctggctctggcgaagttcggctggtggaatctggcggcggacttgtgaaacctggcggctctctgagactgagctgtagcgcctccggcttcgacttcgacaatgcctggatgacctgggtccgacagcctcctggaaaaggcctggaatgggtcggaagaatcacaggccctggcgaaggctggagtgtggattatgccgagagcgtgaagggcagattcaccatcagccgggacaacaccaagaacaccctgtacctggaaatgaacaacgtgcggaccgaggataccggctactacttctgtgcccggaccggcaagtactacgacttttggagcggctaccctcctggcgaggaatactttcaggattggggccagggcaccctggtcatcgtttcttctggcggatcttctggacagatgcagctccaagagtctggccctggcctggtcaagcctagcgaaacactgagcctgacctgttccgtgtccggcgccagcatcagcgatagctactggtcctggatcagaagaagccccggcaaaggcctggaatggatcggctacgtgcacaagagcggcgacaccaactatagccccagcctgaagtccagagtgaacctgagcctggacaccagcaagaaccaggtgtccctgtctctggtggccgctacagctgccgatagcggcaagtactactgcgccagaactctgcacggcagacggatctatggcatcgtggccttcaacgagtggttcacctacttctacatggacgtgtggggcaacggcacccaagtgacagtctcttctgcaagcggaggctccggagataagacccacacatgtcctccatgtcctgctccagagctgctgggtggcccttccgtgtttctgttccctccaaagcctaaggacaccctgatgatcagcaggacccctgaagtgacctgcgtggtggtggatgtgtctcacgaggacccagaagtgaagttcaattggtacgtggacggcgtggaagtgcacaacgccaagaccaagcctagagaggaacagtacaacagcacctacagagtggtgtccgtgctgaccgtgctgcaccaggattggctgaacggcaaagagtacaagtgcaaggtgtccaacaaggccctgcccgctcctatcgagaaaaccatcagcaaggccaagggccagcctcgcgaacctcaagtctgtacactgcctcctagccgggacgagctgaccaagaatcaggtgtcactgagctgcgccgtgaagggcttttaccccagcgacattgccgtggaatgggagagcaatggccagccagagaacaactacaagacaacccctcctgtgctggacagcgacggctcatttttcctggtgtccaagctgacagtggacaagagcagatggcagcagggcaacgtgttcagctgcagcgtgatgcacgaggccctgcacaaccactacacccagaaaagcctgtctctgagccctggc

SEQ ID NO: 355 - DNA, 2214 bp, synthetic construct
  misc_feature 1..2214: note = Artificial Sequence
  source 1..2214: mol_type = other DNA
agcgaactgacccaagatcctgccgtgtctgtggccctgaagcagaccgtgaccatcacctgtagaggcgacagcctgagaagccactacgccagctggtatcagaagaagcctggacaggctcccgtgctgctgttctacggcaagaacaacagacccagcggcatccccgatagattttctggcagcgccagcggcaatagagccagcctgacaattactggcgcccaggccgaagatgaggccgactactactgcagcagcagagacaagagcggcagcagactgtccgtttttggcggaggcaccaagctgaccgtgctgggcggatcttctggaagcgatatctctgtggcccctggcgagacagccagaatcagctgtggcgagaagtccctgggaagcagagccgtgcagtggtatcagcatagagccggacaggcccctagcctgatcatctacaacaaccaggacagacccagcggcatccccgagagattttctggcagccctgatagccctttcggcaccacagccacactgaccatcacatctgtggaagccggcgacgaggccgactactactgtcacatctgggacagcagggtgcccaccaaatgggttttcggcggaggcacaaccctgaccgttctgggaggcggaggatctggcggatctggaagtggcggcggtggatctgcttctggctctggccagatgcagctccaagagtctggccctggcctggtcaagcctagcgaaacactgagcctgacctgttccgtgtccggcgccagcatcagcgatagctactggtcctggatcagaagaagccccggcaaaggcctggaatggatcggctacgtgcacaagagcggcgacaccaactatagccccagcctgaagtccagagtgaacctgagcctggacaccagcaagaaccaggtgtccctgtctctggtggccgctacagctgccgatagcggcaagtactactgcgccagaactctgcacggcagacggatctatggcatcgtggccttcaacgagtggttcacctacttctacatggacgtgtggggcaacggcacccaagtgacagtctcttctggcggatcttctggagaagttcggctggtggaatctggcggcggacttgtgaaacctggcggctctctgagactgagctgtagcgcctccggcttcgacttcgacaatgcctggatgacctgggtccgacagcctcctggaaaaggcctggaatgggtcggaagaatcacaggccctggcgaaggctggagtgtggattatgccgagagcgtgaagggcagattcaccatcagccgggacaacaccaagaacaccctgtacctggaaatgaacaacgtgcggaccgaggataccggctactacttctgtgcccggaccggcaagtactacgacttttggagcggctaccctcctggcgaggaatactttcaggattggggccagggcaccctggtcatcgtttcttctgcaagcggaggctccggagataagacccacacatgtcctccatgtcctgctccagagctgctgggtggcccttccgtgtttctgttccctccaaagcctaaggacaccctgatgatcagcaggacccctgaagtgacctgcgtggtggtggatgtgtctcacgaggacccagaagtgaagttcaattggtacgtggacggcgtggaagtgcacaacgccaagaccaagcctagagaggaacagtacaacagcacctacagagtggtgtccgtgctgaccgtgctgcaccaggattggctgaacggcaaagagtacaagtgcaaggtgtccaacaaggccctgcccgctcctatcgagaaaaccatcagcaaggccaagggccagcctcgcgaacctcaagtctgtacactgcctcctagccgggacgagctgaccaagaatcaggtgtcactgagctgcgccgtgaagggcttttaccccagcgacattgccgtggaatgggagagcaatggccagccagagaacaactacaagacaacccctcctgtgctggacagcgacggctcatttttcctggtgtccaagctgacagtggacaagagcagatggcagcagggcaacgtgttcagctgcagcgtgatgcacgaggccctgcacaaccactacacccagaaaagcctgtctctgagccctggc

SEQ ID NO: 356 - DNA, 2199 bp, synthetic construct
  misc_feature 1..2199: note = Artificial Sequence
  source 1..2199: mol_type = other DNA
gagatcgtgctgacacagagccctggcaccctgagcctgtctccaggcgagacagccatcatcagctgccggacaagccagtacggcagcctggcctggtatcagcagaggcctggacaggcccccagactcgtgatctacagcggcagcacaagagccgccggaatccccgatagattcagcggctccagatggggccctgactacaacctgaccatcagcaacctggaaagcggcgacttcggcgtgtactactgccagcagtacgagttcttcggccagggcaccaaggtgcaggtggacatcaagggcggatcttctggacagtctgctctgacacagcctgcctctgtgtctggctctcctggccagaccatcaccatcagctgtaacggcaccagctctgacgtcggcggctttgatagcgtgtcctggtatcagcagagccccggcaaagcccctaaagtgatggtgttcgatgtgtcccaccggcctagcggcatcagcaatagattcagcggcagcaagagcggcaacaccgccagcctgacaatctctggactgcacatcgaggacgagggcgactacttctgtagcagcctgaccgacagaagccaccggatttttggcggaggcaccaaagtgaccgtgctgggaggcggaggatctggcggatctggaagtggcggcggtggatctgcttctggctctggccaagaacagctggtggaatctggtggcggagtggttcaacctggcggctctctgagactgagctgtctggcctccggcttcaccttccacaaatacggcatgcactgggtccgacaggcccctggaaaaggccttgaatgggtcgccctgatcagcgacgacggcatgagaaagtaccacagcgacagcatgtggggcagagtgaccatcagccgggacaacagcaagaacaccctgtacctgcagttcagctccctgaaggtggaagataccgccatgttcttttgcgccagagaagccggcggacccatctggcatgacgacgtgaagtactacgacttcaacgacggctactacaactaccactacatggacgtgtggggcaagggcaccaccgtgacagtttcttctggcggatcttctggacaggttcagctggttcagtctggcggacagatgaagaaacccggcgagagcatgcggatcagctgtagagccagcggctacgagttcatcgactgcaccctgaactggatcagactggcccctggcaaaagacccgagtggatgggatggctgaagcctagaggcggagccgtgaattacgccagacctctgcagggcagagtgaccatgaccagggacgtgtacagcgataccgccttcctggaactgagaagcctgaccgtggatgataccgccgtgtacttctgcacccggggcaagaactgcgactacaactgggacttcgagcactggggcagaggcacacctgtgatcgttagctctgcaagcggaggctccggagataagacccacacatgtcctccatgtcctgctccagaactgctgggcggaccttccgtgtttctgttccctccaaagcctaaggacaccctgatgatcagcaggacccctgaagtgacctgcgtggtggtggatgtgtctcacgaggacccagaagtgaagttcaattggtacgtggacggcgtggaagtgcacaacgccaagaccaagcctagagaggaacagtacaacagcacctacagagtggtgtccgtgctgacagtgctgcaccaggattggctgaacggcaaagagtacaagtgcaaggtgtccaacaaggccctgcccgcccctatcgagaaaaccatcagcaaggccaagggccagcctagggaaccccaggtttacacccttcctccatgccgggatgagctgaccaagaaccaggtgtccctgtggtgtctggtcaagggcttctaccccagcgacattgccgtggaatgggagagcaatggccagcctgagaacaactacaagaccacacctcctgtgctggactccgacggatcattcttcctgtacagcaagctgactgtggacaagagcagatggcagcagggcaacgtgttcagctgcagcgtgatgcacgaggccctgcacaaccactacacacagaagtccctgtctctgagccctggc

SEQ ID NO: 357 - DNA, 2199 bp, synthetic construct
  misc_feature 1..2199: note = Artificial Sequence
  source 1..2199: mol_type = other DNA
cagtctgctctgacacagcctgcctctgtgtctggctctcctggccagaccatcaccatcagctgtaacggcaccagctctgacgtcggcggctttgatagcgtgtcctggtatcagcagagccccggcaaagcccctaaagtgatggtgttcgatgtgtcccaccggcctagcggcatcagcaatagattcagcggcagcaagagcggcaacaccgccagcctgacaatctctggactgcacatcgaggacgagggcgactacttctgtagcagcctgaccgacagaagccaccggatttttggcggaggcaccaaagtgaccgtgctgggcggatcttctggagagatcgtgctgacacagagccctggcaccctgagcctgtctccaggcgagacagccatcatcagctgccggacaagccagtacggcagcctggcctggtatcagcagaggcctggacaggcccccagactcgtgatctacagcggcagcacaagagccgccggaatccccgatagattcagcggctccagatggggccctgactacaacctgaccatcagcaacctggaaagcggcgacttcggcgtgtactactgccagcagtacgagttcttcggccagggcaccaaggtgcaggtggacatcaagggaggcggaggatctggcggatctggaagtggcggcggtggatctgcttctggctctggccaggttcagctggttcagtctggcggacagatgaagaaacccggcgagagcatgcggatcagctgtagagccagcggctacgagttcatcgactgcaccctgaactggatcagactggcccctggcaaaagacccgagtggatgggatggctgaagcctagaggcggagccgtgaattacgccagacctctgcagggcagagtgaccatgaccagggacgtgtacagcgataccgccttcctggaactgagaagcctgaccgtggatgataccgccgtgtacttctgcacccggggcaagaactgcgactacaactgggacttcgagcactggggcagaggcacacctgtgatcgttagctctggcggatcttctggacaagaacagctggtggaatctggtggcggagtggttcaacctggcggctctctgagactgagctgtctggcctccggcttcaccttccacaaatacggcatgcactgggtccgacaggcccctggaaaaggccttgaatgggtcgccctgatcagcgacgacggcatgagaaagtaccacagcgacagcatgtggggcagagtgaccatcagccgggacaacagcaagaacaccctgtacctgcagttcagctccctgaaggtggaagataccgccatgttcttttgcgccagagaagccggcggacccatctggcatgacgacgtgaagtactacgacttcaacgacggctactacaactaccactacatggacgtgtggggcaagggcaccaccgtgacagtttcttctgcaagcggaggctccggagataagacccacacatgtcctccatgtcctgctccagaactgctgggcggaccttccgtgtttctgttccctccaaagcctaaggacaccctgatgatcagcaggacccctgaagtgacctgcgtggtggtggatgtgtctcacgaggacccagaagtgaagttcaattggtacgtggacggcgtggaagtgcacaacgccaagaccaagcctagagaggaacagtacaacagcacctacagagtggtgtccgtgctgacagtgctgcaccaggattggctgaacggcaaagagtacaagtgcaaggtgtccaacaaggccctgcccgcccctatcgagaaaaccatcagcaaggccaagggccagcctagggaaccccaggtttacacccttcctccatgccgggatgagctgaccaagaaccaggtgtccctgtggtgtctggtcaagggcttctaccccagcgacattgccgtggaatgggagagcaatggccagcctgagaacaactacaagaccacacctcctgtgctggactccgacggatcattcttcctgtacagcaagctgactgtggacaagagcagatggcagcagggcaacgtgttcagctgcagcgtgatgcacgaggccctgcacaaccactacacacagaagtccctgtctctgagccctggc

SEQ ID NO: 358 - DNA, 2238 bp, synthetic construct
  misc_feature 1..2238: note = Artificial Sequence
  source 1..2238: mol_type = other DNA
agcgatatctctgtggcccctggcgagacagccagaatcagctgtggcgagaagtccctgggaagcagagccgtgcagtggtatcagcatagagccggacaggcccctagcctgatcatctacaacaaccaggacagacccagcggcatccccgagagattttctggcagccctgatagccctttcggcaccacagccacactgaccatcacatctgtggaagccggcgacgaggccgactactactgtcacatctgggacagcagggtgcccaccaaatgggttttcggcggaggcacaaccctgaccgttctgggcggatcttctggacagtctgctctgacacagcctgcctctgtgtctggctctcctggccagaccatcaccatcagctgtaacggcaccagctctgacgtcggcggctttgatagcgtgtcctggtatcagcagagccccggcaaagcccctaaagtgatggtgttcgatgtgtcccaccggcctagcggcatcagcaatagattcagcggcagcaagagcggcaacaccgccagcctgacaatctctggactgcacatcgaggacgagggcgactacttctgtagcagcctgaccgacagaagccaccggatttttggcggaggcaccaaagtgaccgtgctgggaggcggaggatctggcggatctggaagtggcggcggtggatctgcttctggctctggccaagaacagctggtggaatctggtggcggagtggttcaacctggcggctctctgagactgagctgtctggcctccggcttcaccttccacaaatacggcatgcactgggtccgacaggcccctggaaaaggccttgaatgggtcgccctgatcagcgacgacggcatgagaaagtaccacagcgacagcatgtggggcagagtgaccatcagccgggacaacagcaagaacaccctgtacctgcagttcagctccctgaaggtggaagataccgccatgttcttttgcgccagagaagccggcggacccatctggcatgacgacgtgaagtactacgacttcaacgacggctactacaactaccactacatggacgtgtggggcaagggcaccaccgtgacagtttcttctggcggatcttctggacagatgcagctccaagagtctggccctggcctggtcaagcctagcgaaacactgagcctgacctgttccgtgtccggcgccagcatcagcgatagctactggtcctggatcagaagaagccccggcaaaggcctggaatggatcggctacgtgcacaagagcggcgacaccaactatagccccagcctgaagtccagagtgaacctgagcctggacaccagcaagaaccaggtgtccctgtctctggtggccgctacagctgccgatagcggcaagtactactgcgccagaactctgcacggcagacggatctatggcatcgtggccttcaacgagtggttcacctacttctacatggacgtgtggggcaacggcacccaagtgacagtctcttctgcaagcggaggctccggagataagacccacacatgtcctccatgtcctgctccagagctgctgggtggcccttccgtgtttctgttccctccaaagcctaaggacaccctgatgatcagcaggacccctgaagtgacctgcgtggtggtggatgtgtctcacgaggacccagaagtgaagttcaattggtacgtggacggcgtggaagtgcacaacgccaagaccaagcctagagaggaacagtacaacagcacctacagagtggtgtccgtgctgaccgtgctgcaccaggattggctgaacggcaaagagtacaagtgcaaggtgtccaacaaggccctgcccgctcctatcgagaaaaccatcagcaaggccaagggccagcctcgcgaacctcaagtctgtacactgcctcctagccgggacgagctgaccaagaatcaggtgtcactgagctgcgccgtgaagggcttttaccccagcgacattgccgtggaatgggagagcaatggccagccagagaacaactacaagacaacccctcctgtgctggacagcgacggctcatttttcctggtgtccaagctgacagtggacaagagcagatggcagcagggcaacgtgttcagctgcagcgtgatgcacgaggccctgcacaaccactacacccagaaaagcctgtctctgagccctggc

SEQ ID NO: 359 - DNA, 2238 bp, synthetic construct
  misc_feature 1..2238: note = Artificial Sequence
  source 1..2238: mol_type = other DNA
cagtctgctctgacacagcctgcctctgtgtctggctctcctggccagaccatcaccatcagctgtaacggcaccagctctgacgtcggcggctttgatagcgtgtcctggtatcagcagagccccggcaaagcccctaaagtgatggtgttcgatgtgtcccaccggcctagcggcatcagcaatagattcagcggcagcaagagcggcaacaccgccagcctgacaatctctggactgcacatcgaggacgagggcgactacttctgtagcagcctgaccgacagaagccaccggatttttggcggaggcaccaaagtgaccgtgctgggcggatcttctggaagcgatatctctgtggcccctggcgagacagccagaatcagctgtggcgagaagtccctgggaagcagagccgtgcagtggtatcagcatagagccggacaggcccctagcctgatcatctacaacaaccaggacagacccagcggcatccccgagagattttctggcagccctgatagccctttcggcaccacagccacactgaccatcacatctgtggaagccggcgacgaggccgactactactgtcacatctgggacagcagggtgcccaccaaatgggttttcggcggaggcacaaccctgaccgttctgggaggcggaggatctggcggatctggaagtggcggcggtggatctgcttctggctctggccagatgcagctccaagagtctggccctggcctggtcaagcctagcgaaacactgagcctgacctgttccgtgtccggcgccagcatcagcgatagctactggtcctggatcagaagaagccccggcaaaggcctggaatggatcggctacgtgcacaagagcggcgacaccaactatagccccagcctgaagtccagagtgaacctgagcctggacaccagcaagaaccaggtgtccctgtctctggtggccgctacagctgccgatagcggcaagtactactgcgccagaactctgcacggcagacggatctatggcatcgtggccttcaacgagtggttcacctacttctacatggacgtgtggggcaacggcacccaagtgacagtctcttctggcggatcttctggacaagaacagctggtggaatctggtggcggagtggttcaacctggcggctctctgagactgagctgtctggcctccggcttcaccttccacaaatacggcatgcactgggtccgacaggcccctggaaaaggccttgaatgggtcgccctgatcagcgacgacggcatgagaaagtaccacagcgacagcatgtggggcagagtgaccatcagccgggacaacagcaagaacaccctgtacctgcagttcagctccctgaaggtggaagataccgccatgttcttttgcgccagagaagccggcggacccatctggcatgacgacgtgaagtactacgacttcaacgacggctactacaactaccactacatggacgtgtggggcaagggcaccaccgtgacagtttcttctgcaagcggaggctccggagataagacccacacatgtcctccatgtcctgctccagagctgctgggtggcccttccgtgtttctgttccctccaaagcctaaggacaccctgatgatcagcaggacccctgaagtgacctgcgtggtggtggatgtgtctcacgaggacccagaagtgaagttcaattggtacgtggacggcgtggaagtgcacaacgccaagaccaagcctagagaggaacagtacaacagcacctacagagtggtgtccgtgctgaccgtgctgcaccaggattggctgaacggcaaagagtacaagtgcaaggtgtccaacaaggccctgcccgctcctatcgagaaaaccatcagcaaggccaagggccagcctcgcgaacctcaagtctgtacactgcctcctagccgggacgagctgaccaagaatcaggtgtcactgagctgcgccgtgaagggcttttaccccagcgacattgccgtggaatgggagagcaatggccagccagagaacaactacaagacaacccctcctgtgctggacagcgacggctcatttttcctggtgtccaagctgacagtggacaagagcagatggcagcagggcaacgtgttcagctgcagcgtgatgcacgaggccctgcacaaccactacacccagaaaagcctgtctctgagccctggc

SEQ ID NO: 360 - DNA, 2175 bp, synthetic construct
  misc_feature 1..2175: note = Artificial Sequence
  source 1..2175: mol_type = other DNA
gagatcgtgctgacacagagccctggcaccctgagcctgtctccaggcgagacagccatcatcagctgccggacaagccagtacggcagcctggcctggtatcagcagaggcctggacaggcccccagactcgtgatctacagcggcagcacaagagccgccggaatccccgatagattcagcggctccagatggggccctgactacaacctgaccatcagcaacctggaaagcggcgacttcggcgtgtactactgccagcagtacgagttcttcggccagggcaccaaggtgcaggtggacatcaagggcggatcttctggaagcgaactgacccaagatcctgccgtgtctgtggccctgaagcagaccgtgaccatcacctgtagaggcgacagcctgagaagccactacgccagctggtatcagaagaagcctggacaggctcccgtgctgctgttctacggcaagaacaacagacccagcggcatccccgatagattttctggcagcgccagcggcaatagagccagcctgacaattactggcgcccaggccgaagatgaggccgactactactgcagcagcagagacaagagcggcagcagactgtccgtttttggcggaggcaccaagctgaccgtgctgggaggcggaggatctggcggatctggaagtggcggcggtggatctgcttctggctctggcgaagttcggctggtggaatctggcggcggacttgtgaaacctggcggctctctgagactgagctgtagcgcctccggcttcgacttcgacaatgcctggatgacctgggtccgacagcctcctggaaaaggcctggaatgggtcggaagaatcacaggccctggcgaaggctggagtgtggattatgccgagagcgtgaagggcagattcaccatcagccgggacaacaccaagaacaccctgtacctggaaatgaacaacgtgcggaccgaggataccggctactacttctgtgcccggaccggcaagtactacgacttttggagcggctaccctcctggcgaggaatactttcaggattggggccagggcaccctggtcatcgtttcttctggcggatcttctggacaggttcagctggttcagtctggcggacagatgaagaaacccggcgagagcatgcggatcagctgtagagccagcggctacgagttcatcgactgcaccctgaactggatcagactggcccctggcaaaagacccgagtggatgggatggctgaagcctagaggcggagccgtgaattacgccagacctctgcagggcagagtgaccatgaccagggacgtgtacagcgataccgccttcctggaactgagaagcctgaccgtggatgataccgccgtgtacttctgcacccggggcaagaactgcgactacaactgggacttcgagcactggggcagaggcacacctgtgatcgttagctctgcaagcggaggctccggagataagacccacacatgtcctccatgtcctgctccagaactgctgggcggaccttccgtgtttctgttccctccaaagcctaaggacaccctgatgatcagcaggacccctgaagtgacctgcgtggtggtggatgtgtctcacgaggacccagaagtgaagttcaattggtacgtggacggcgtggaagtgcacaacgccaagaccaagcctagagaggaacagtacaacagcacctacagagtggtgtccgtgctgacagtgctgcaccaggattggctgaacggcaaagagtacaagtgcaaggtgtccaacaaggccctgcccgcccctatcgagaaaaccatcagcaaggccaagggccagcctagggaaccccaggtttacacccttcctccatgccgggatgagctgaccaagaaccaggtgtccctgtggtgtctggtcaagggcttctaccccagcgacattgccgtggaatgggagagcaatggccagcctgagaacaactacaagaccacacctcctgtgctggactccgacggatcattcttcctgtacagcaagctgactgtggacaagagcagatggcagcagggcaacgtgttcagctgcagcgtgatgcacgaggccctgcacaaccactacacacagaagtccctgtctctgagccctggc

SEQ ID NO: 361 - DNA, 2175 bp, synthetic construct
  misc_feature 1..2175: note = Artificial Sequence
  source 1..2175: mol_type = other DNA
agcgaactgacccaagatcctgccgtgtctgtggccctgaagcagaccgtgaccatcacctgtagaggcgacagcctgagaagccactacgccagctggtatcagaagaagcctggacaggctcccgtgctgctgttctacggcaagaacaacagacccagcggcatccccgatagattttctggcagcgccagcggcaatagagccagcctgacaattactggcgcccaggccgaagatgaggccgactactactgcagcagcagagacaagagcggcagcagactgtccgtttttggcggaggcaccaagctgaccgtgctgggcggatcttctggagagatcgtgctgacacagagccctggcaccctgagcctgtctccaggcgagacagccatcatcagctgccggacaagccagtacggcagcctggcctggtatcagcagaggcctggacaggcccccagactcgtgatctacagcggcagcacaagagccgccggaatccccgatagattcagcggctccagatggggccctgactacaacctgaccatcagcaacctggaaagcggcgacttcggcgtgtactactgccagcagtacgagttcttcggccagggcaccaaggtgcaggtggacatcaagggaggcggaggatctggcggatctggaagtggcggcggtggatctgcttctggctctggccaggttcagctggttcagtctggcggacagatgaagaaacccggcgagagcatgcggatcagctgtagagccagcggctacgagttcatcgactgcaccctgaactggatcagactggcccctggcaaaagacccgagtggatgggatggctgaagcctagaggcggagccgtgaattacgccagacctctgcagggcagagtgaccatgaccagggacgtgtacagcgataccgccttcctggaactgagaagcctgaccgtggatgataccgccgtgtacttctgcacccggggcaagaactgcgactacaactgggacttcgagcactggggcagaggcacacctgtgatcgttagctctggcggatcttctggagaagttcggctggtggaatctggcggcggacttgtgaaacctggcggctctctgagactgagctgtagcgcctccggcttcgacttcgacaatgcctggatgacctgggtccgacagcctcctggaaaaggcctggaatgggtcggaagaatcacaggccctggcgaaggctggagtgtggattatgccgagagcgtgaagggcagattcaccatcagccgggacaacaccaagaacaccctgtacctggaaatgaacaacgtgcggaccgaggataccggctactacttctgtgcccggaccggcaagtactacgacttttggagcggctaccctcctggcgaggaatactttcaggattggggccagggcaccctggtcatcgtttcttctgcaagcggaggctccggagataagacccacacatgtcctccatgtcctgctccagaactgctgggcggaccttccgtgtttctgttccctccaaagcctaaggacaccctgatgatcagcaggacccctgaagtgacctgcgtggtggtggatgtgtctcacgaggacccagaagtgaagttcaattggtacgtggacggcgtggaagtgcacaacgccaagaccaagcctagagaggaacagtacaacagcacctacagagtggtgtccgtgctgacagtgctgcaccaggattggctgaacggcaaagagtacaagtgcaaggtgtccaacaaggccctgcccgcccctatcgagaaaaccatcagcaaggccaagggccagcctagggaaccccaggtttacacccttcctccatgccgggatgagctgaccaagaaccaggtgtccctgtggtgtctggtcaagggcttctaccccagcgacattgccgtggaatgggagagcaatggccagcctgagaacaactacaagaccacacctcctgtgctggactccgacggatcattcttcctgtacagcaagctgactgtggacaagagcagatggcagcagggcaacgtgttcagctgcagcgtgatgcacgaggccctgcacaaccactacacacagaagtccctgtctctgagccctggc

SEQ ID NO: 362 - protein, 5 aa, synthetic construct
  REGION 1..5: note = Artificial Sequence
DSYWS

SEQ ID NO: 363 - protein, 16 aa, synthetic construct
  REGION 1..16: note = Artificial Sequence
YVHKSGDTNYSPSLKS

SEQ ID NO: 364 - protein, 24 aa, synthetic construct
  REGION 1..24: note = Artificial Sequence
TLHGRRIYGIVAFNEWFTYFYMDV

SEQ ID NO: 365 - protein, 5 aa, synthetic construct
  REGION 1..5: note = Artificial Sequence
DCTLN

SEQ ID NO: 366 - protein, 17 aa, synthetic construct
  REGION 1..17: note = Artificial Sequence
WLKPRGGAVNYARPLQG

SEQ ID NO: 367 - protein, 12 aa, synthetic construct
  REGION 1..12: note = Artificial Sequence
GKNCDYNWDFEH

SEQ ID NO: 368 - protein, 5 aa, synthetic construct
  REGION 1..5: note = Artificial Sequence
NAWMT

SEQ ID NO: 369 - protein, 19 aa, synthetic construct
  REGION 1..19: note = Artificial Sequence
RITGPGEGWSVDYAESVKG

SEQ ID NO: 370 - protein, 20 aa, synthetic construct
  REGION 1..20: note = Artificial Sequence
TGKYYDFWSGYPPGEEYFQD

SEQ ID NO: 371 - protein, 5 aa, synthetic construct
  REGION 1..5: note = Artificial Sequence
KYGMH

SEQ ID NO: 372 - protein, 17 aa, synthetic construct
  REGION 1..17: note = Artificial Sequence
LISDDGMRKYHSDSMWG

SEQ ID NO: 373 - protein, 28 aa, synthetic construct
  REGION 1..28: note = Artificial Sequence
EAGGPIWHDDVKYYDFNDGYYNYHYMDV

SEQ ID NO: 374 - protein, 14 aa, synthetic construct
  REGION 1..14: note = Artificial Sequence
NGTSSDVGGFDSVS

SEQ ID NO: 375 - protein, 7 aa, synthetic construct
  REGION 1..7: note = Artificial Sequence
DVSHRPS

SEQ ID NO: 376 - protein, 10 aa, synthetic construct
  REGION 1..10: note = Artificial Sequence
SSLTDRSHRI

SEQ ID NO: 377 - skipped

SEQ ID NO: 378 - protein, 11 aa, synthetic construct
  REGION 1..11: note = Artificial Sequence
GEKSLGSRAVQ

SEQ ID NO: 379 - protein, 7 aa, synthetic construct
  REGION 1..7: note = Artificial Sequence
NNQDRPS

SEQ ID NO: 380 - protein, 9 aa, synthetic construct
  REGION 1..9: note = Artificial Sequence
DSRVPTKWV

SEQ ID NO: 381 - protein, 9 aa, synthetic construct
  REGION 1..9: note = Artificial Sequence
RTSQYGSLA

SEQ ID NO: 382 - protein, 7 aa, synthetic construct
  REGION 1..7: note = Artificial Sequence
SGSTRAA

SEQ ID NO: 383 - protein, 5 aa, synthetic construct
  REGION 1..5: note = Artificial Sequence
QQYEF

SEQ ID NO: 384 - protein, 11 aa, synthetic construct
  REGION 1..11: note = Artificial Sequence
RGDSLRSHYAS

SEQ ID NO: 385 - protein, 7 aa, synthetic construct
  REGION 1..7: note = Artificial Sequence
GKNNRPS

SEQ ID NO: 386 - protein, 12 aa, synthetic construct
  REGION 1..12: note = Artificial Sequence
SSRDKSGSRLSV

SEQ ID NO: 387 - DNA, 1383 bp, synthetic construct
  misc_feature 1..1383: note = Artificial Sequence
  source 1..1383: mol_type = other DNA
cagatgcagctccaagagtctggccctggcctggtcaagcctagcgaaacactgagcctgacctgttccgtgtccggcgccagcatcagcgatagctactggtcctggatcagaagaagccccggcaaaggcctggaatggatcggctacgtgcacaagagcggcgacaccaactatagccccagcctgaagtccagagtgaacctgagcctggacaccagcaagaaccaggtgtccctgtctctggtggccgctacagctgccgatagcggcaagtactactgcgccagaactctgcacggcagacggatctatggcatcgtggccttcaacgagtggttcacctacttctacatggacgtgtggggcaacggcacccaagtgacagtctcttctgcttcgaccaagggcccatccgtgtttcctctggctcccagcagcaagtctacaagcggaggaacagccgctctgggctgcctggtcaaggattactttcccgagcctgtgaccgtgtcctggaattctggcgctctgacaagcggcgtgcacacctttccagctgtgctgcaaagcagcggcctgtactctctgagcagcgtggtcacagtgcctagctctagcctgggcacccagacctacatctgcaatgtgaaccacaagcctagcaacaccaaggtggacaagaaggtggaacccaagagctgcgataagacccacacatgtcctccatgtcctgctccagaactgctgggcggaccttccgtgtttctgttccctccaaagcctaaggacaccctgatgatcagcaggacccctgaagtgacctgcgtggtggtggatgtgtctcacgaggacccagaagtgaagttcaattggtacgtggacggcgtggaagtgcacaacgccaagaccaagcctagagaggaacagtacaacagcacctacagagtggtgtccgtgctgacagtgctgcaccaggattggctgaacggcaaagagtacaagtgcaaggtgtccaacaaggccctgcccgcccctatcgagaaaaccatcagcaaggccaagggccagcctagggaaccccaggtttacacccttcctccatgccgggatgagctgaccaagaaccaggtgtccctgtggtgtctggtcaagggcttctaccccagcgacattgccgtggaatgggagagcaatggccagcctgagaacaactacaagaccacacctcctgtgctggactccgacggatcattcttcctgtacagcaagctgactgtggacaagagcagatggcagcagggcaacgtgttcagctgcagcgtgatgcacgaggccctgcacaaccactacacacagaagtccctgtctctgagccctggc

SEQ ID NO: 388 - DNA, 1398 bp, synthetic construct
  misc_feature 1..1398: note = Artificial Sequence
  source 1..1398: mol_type = other DNA
caagaacagctggtggaatctggtggcggagtggttcaacctggcggctctctgagactgagctgtctggcctccggcttcaccttccacaaatacggcatgcactgggtccgacaggcccctggaaaaggccttgaatgggtcgccctgatcagcgacgacggcatgagaaagtaccacagcgacagcatgtggggcagagtgaccatcagccgggacaacagcaagaacaccctgtacctgcagttcagctccctgaaggtggaagataccgccatgttcttttgcgccagagaagccggcggacccatctggcatgacgacgtgaagtactacgacttcaacgacggctactacaactaccactacatggacgtgtggggcaagggcaccaccgtgacagtttcttctgcttcgaccaagggcccatccgtgtttcctctggctcccagcagcaagtctacaagcggaggaacagccgctctgggctgcctggtcaaggattactttcccgagcctgtgaccgtgtcctggaattctggcgctctgacaagcggcgtgcacacctttccagctgtgctgcaaagcagcggcctgtactctctgagcagcgtggtcacagtgcctagctctagcctgggcacccagacctacatctgcaatgtgaaccacaagcctagcaacaccaaggtggacaagaaggtggaacccaagagctgcgataagacccacacatgtcctccatgtcctgctccagaactgctgggcggaccttccgtgtttctgttccctccaaagcctaaggacaccctgatgatcagcaggacccctgaagtgacctgcgtggtggtggatgtgtctcacgaggacccagaagtgaagttcaattggtacgtggacggcgtggaagtgcacaacgccaagaccaagcctagagaggaacagtacaacagcacctacagagtggtgtccgtgctgacagtgctgcaccaggattggctgaacggcaaagagtacaagtgcaaggtgtccaacaaggccctgcccgcccctatcgagaaaaccatcagcaaggccaagggccagcctagggaaccccaggtttacacccttcctccatgccgggatgagctgaccaagaaccaggtgtccctgtggtgtctggtcaagggcttctaccccagcgacattgccgtggaatgggagagcaatggccagcctgagaacaactacaagaccacacctcctgtgctggactccgacggatcattcttcctgtacagcaagctgactgtggacaagagcagatggcagcagggcaacgtgttcagctgcagcgtgatgcacgaggccctgcacaaccactacacacagaagtccctgtctctgagccctggc

SEQ ID NO: 389 - DNA, 633 bp, synthetic construct
  misc_feature 1..633: note = Artificial Sequence
  source 1..633: mol_type = other DNA
agcgatatctctgtggcccctggcgagacagccagaatcagctgtggcgagaagtccctgggaagcagagccgtgcagtggtatcagcatagagccggacaggcccctagcctgatcatctacaacaaccaggacagacccagcggcatccccgagagattttctggcagccctgatagccctttcggcaccacagccacactgaccatcacatctgtggaagccggcgacgaggccgactactactgtcacatctgggacagcagggtgcccaccaaatgggttttcggcggaggcacaaccctgaccgttctgggacagcctaaggccaatcctaccgtgacactgttccctccaagcagcgaagaactgcaggccaacaaggccacactcgtgtgcctgatcagcgacttttatcctggcgccgtgaccgtggcctggaaggctgatggatctcctgtgaaagccggcgtggaaaccaccaagcctagcaagcagagcaacaacaaatacgccgccagcagctacctgagcctgacacctgagcagtggaagtcccacagatcctacagctgccaagtgacccacgagggcagcaccgtggaaaaaacagtggcccctaccgagtgcagc

SEQ ID NO: 390 - DNA, 648 bp, synthetic construct
  misc_feature 1..648: note = Artificial Sequence
  source 1..648: mol_type = other DNA
cagtctgctctgacacagcctgcctctgtgtctggctctcctggccagaccatcaccatcagctgtaacggcaccagctctgacgtcggcggctttgatagcgtgtcctggtatcagcagagccccggcaaagcccctaaagtgatggtgttcgatgtgtcccaccggcctagcggcatcagcaatagattcagcggcagcaagagcggcaacaccgccagcctgacaatctctggactgcacatcgaggacgagggcgactacttctgtagcagcctgaccgacagaagccaccggatttttggcggaggcaccaaagtgaccgtgctgggacagcctaaggccaatcctaccgtgacactgttccctccaagcagcgaagaactgcaggccaacaaggccacactcgtgtgcctgatcagcgacttttatcctggcgccgtgaccgtggcctggaaggctgatggatctcctgtgaaagccggcgtggaaaccaccaagcctagcaagcagagcaacaacaaatacgccgccagcagctacctgagcctgacacctgagcagtggaagtcccacagatcctacagctgccaagtgacccacgagggcagcaccgtggaaaaaacagtggcccctaccgagtgcagc

SEQ ID NO: 391 - protein, 226 aa, synthetic construct
  REGION 1..226: note = Artificial Sequence
DKTHTCPPCPAPEAAGGPSVFLFPPKPKDTLMISRTPEVTCVVVDVSHEDPEVKFNWYVDGVEVHNAKTKPREEQYNSTYRVVSVLTVLHQDWLNGKEYKCKVSNKALAAPIEKTISKAKGQPREPQVCTLPPSRDELTKNQVSLSCAVKGFYPSDIAVEWESNGQPENNYKTTPPVLDSDGSFFLVSKLTVDKSRWQQGNVFSCSVMHEALHNHYTQKSLSLSPG

SEQ ID NO: 392 - protein, 226 aa, synthetic construct
  REGION 1..226: note = Artificial Sequence
DKTHTCPPCPAPEAAGGPSVFLFPPKPKDTLMISRTPEVTCVVVDVSHEDPEVKFNWYVDGVEVHNAKTKPREEQYNSTYRVVSVLTVLHQDWLNGKEYKCKVSNKALAAPIEKTISKAKGQPREPQVYTLPPCRDELTKNQVSLWCLVKGFYPSDIAVEWESNGQPENNYKTTPPVLDSDGSFFLYSKLTVDKSRWQQGNVFSCSVMHEALHNHYTQKSLSLSPG

SEQ ID NO: 393 - protein, 226 aa, synthetic construct
  REGION 1..226: note = Artificial Sequence
DTTHTCPPCPAPEAAGGPSVFLFPPKPKDTLMISRTPEVTCVVVDVSHEDPEVKFNWYVDGVEVHNAKTKPREEQYNSTYRVVSVLTVLHQDWLNGKEYKCKVSNKALAAPIEKTISKAKGQPREPQVCTLPPSRDELTKNQVSLSCAVKGFYPSDIAVEWESNGQPENNYKTTPPVLDSDGSFFLVSKLTVDKSRWQQGNVFSCSVMHEALHNHYTQKSLSLSPG

SEQ ID NO: 394 - protein, 226 aa, synthetic construct
  REGION 1..226: note = Artificial Sequence
DTTHTCPPCPAPEAAGGPSVFLFPPKPKDTLMISRTPEVTCVVVDVSHEDPEVKFNWYVDGVEVHNAKTKPREEQYNSTYRVVSVLTVLHQDWLNGKEYKCKVSNKALAAPIEKTISKAKGQPREPQVYTLPPCRDELTKNQVSLWCLVKGFYPSDIAVEWESNGQPENNYKTTPPVLDSDGSFFLYSKLTVDKSRWQQGNVFSCSVMHEALHNHYTQKSLSLSPG

SEQ ID NO: 395 - protein, 226 aa, synthetic construct
  REGION 1..226: note = Artificial Sequence
DKTHTCPPCPAPEAAGGPSVFLFPPKPKDTLMISRTPEVTCVVVDVSHEDPEVKFNWYVDGVEVHNAKTKPREEQYNSTYRVVSVLTVLHQDWLNGKEYKCKVSNKALAAPIEKTISKAKGQPREPQVYTLPPSRDELTKNQVSLTCLVKGFYPSDIAVEWESNGQPENNYKTTPPVLDSDGSFFLYSKLTVDKSRWQQGNVFSCSVMHEALHNHYTQKSLSLSPG

SEQ ID NO: 396 - protein, 222 aa, synthetic construct
  REGION 1..222: note = Artificial Sequence
TCPPCPAPEAAGGPSVFLFPPKPKDTLMISRTPEVTCVVVDVSHEDPEVKFNWYVDGVEVHNAKTKPREEQYNSTYRVVSVLTVLHQDWLNGKEYKCKVSNKALAAPIEKTISKAKGQPREPQVYTLPPSRDELTKNQVSLTCLVKGFYPSDIAVEWESNGQPENNYKTTPPVLDSDGSFFLYSKLTVDKSRWQQGNVFSCSVMHEALHNHYTQKSLSLSPG

SEQ ID NO: 397 - protein, 106 aa, synthetic construct [sequence omitted]

SEQ ID NO: 398 - protein, 120 aa, synthetic construct
  REGION 1..120: note = Artificial Sequence
CPPCPAPEAAGGPSGQPREPQVYTLPPSRDELTKNQVSLTCLVKGFYPSDIAVEWESNGQPENNYKTTPPVLDSDGSFFLYSKLTVDKSRWQQGNVFSCSVMHEALHNHYTQKSLSLSPG

SEQ ID NO: 399 - protein, 125 aa, synthetic construct
  REGION 1..125: note = Artificial Sequence
DKTHTCPPCPAPEAAGGPSGQPREPQVYTLPPSRDELTKNQVSLTCLVKGFYPSDIAVEWESNGQPENNYKTTPPVLDSDGSFFLYSKLTVDKSRWQQGNVFSCSVMHEALHNHYTQKSLSLSPG

SEQ ID NO: 400 - protein, 106 aa, synthetic construct
  REGION 1..106: note = Artificial Sequence
GQPREPQVYTLPPCRDELTKNQVSLTCLVKGFYPSDIAVEWESNGQPENNYKTTPPVLDSDGSFFLYSKLTVDKSRWQQGNVFSCSVMHEALHNHYTQKSLSLSPG

SEQ ID NO: 401 - protein, 106 aa, synthetic construct
  REGION 1..106: note = Artificial Sequence
GQPREPQVCTLPPSRDELTKNQVSLTCLVKGFYPSDIAVEWESNGQPENNYKTTPPVLDSDGSFFLYSKLTVDKSRWQQGNVFSCSVMHEALHNHYTQKSLSLSPG

SEQ ID NO: 402 - protein, 226 aa, synthetic construct
  REGION 1..226: note = Artificial Sequence
DKTHTCPPCPAPELLGGPSVFLFPPKPKDTLMISRTPEVTCVVVDVSHEDPEVKFNWYVDGVEVHNAKTKPREEQYNSTYRVVSVLTVLHQDWLNGKEYKCKVSNKALPAPIEKTISKAKGQPREPQVCTLPPSRDELTKNQVSLSCAVKGFYPSDIAVEWESNGQPENNYKTTPPVLDSDGSFFLVSKLTVDKSRWQQGNVFSCSVMHEALHNHYTQKSLSLSPG

SEQ ID NO: 403 - protein, 226 aa, synthetic construct
  REGION 1..226: note = Artificial Sequence
DKTHTCPPCPAPELLGGPSVFLFPPKPKDTLMISRTPEVTCVVVDVSHEDPEVKFNWYVDGVEVHNAKTKPREEQYNSTYRVVSVLTVLHQDWLNGKEYKCKVSNKALPAPIEKTISKAKGQPREPQVYTLPPCRDELTKNQVSLWCLVKGFYPSDIAVEWESNGQPENNYKTTPPVLDSDGSFFLYSKLTVDKSRWQQGNVFSCSVMHEALHNHYTQKSLSLSPG

SEQ ID NO: 404 - protein, 227 aa, synthetic construct
  REGION 1..227: note = Artificial Sequence
DKTHTCPPCPAPELLGGPSVFLFPPKPKDTLMISRTPEVTCVVVDVSHEDPEVKFNWYVDGVEVHNAKTKPREEQYNSTYRVVSVLTVLHQDWLNGKEYKCKVSNKALPAPIEKTISKAKGQPREPQVYTLPPSRDELTKNQVSLTCLVKGFYPSDIAVEWESNGQPENNYKTTPPVLDSDGSFFLYSKLTVDKSRWQQGNVFSCSVMHEALHNHYTQKSLSLSPGK

SEQ ID NO: 405 - protein, 112 aa, synthetic construct
  REGION 1..112: note = Artificial Sequence
ASTKGPSVFPLAPSSKSTSGGTAALGCLVKDYFPEPVTVSWNSGALTSGVHTFPAVLQSSGLYSLSSVVTVPSSSLGTQTYICNVNHKPSNTKVDKKVEPKSCDKTHTCPPC

SEQ ID NO: 406 - protein, 103 aa, synthetic construct
  REGION 1..103: note = Artificial Sequence
ASTKGPSVFPLAPSSKSTSGGTAALGCLVKDYFPEPVTVSWNSGALTSGVHTFPAVLQSSGLYSLSSVVTVPSSSLGTQTYICNVNHKPSNTKVDKKVEPKSS

SEQ ID NO: 407 - protein, 105 aa, synthetic construct
  REGION 1..105: note = Artificial Sequence
ASTKGPSVFPLAPSSKSTSGGTAALGCLVKDYFPEPVTVSWNSGALTSGVHTFPAVLQSSGLYSLSSVVTVPSSSLGTQTYICNVNHKPSNTKVDKKVEPKTPLG

SEQ ID NO: 408 - protein, 103 aa, synthetic construct
  REGION 1..103: note = Artificial Sequence
ASTKGPSVFPLAPSSKSTSGGTAALGCLVKDYFPEPVTVSWNSGALTSGVHTFPAVLQSSGLYSLSSVVTVPSSSLGTQTYICNVNHKPSNTKVDKKVEPKSC

SEQ ID NO: 409 - protein, 115 aa, synthetic construct
  REGION 1..115: note = Artificial Sequence
ASTKGPSVFPLAPSSKSTSGGTAALGCLVKDYFPEPVTVSWNSGALTSGVHTFPAVLQSSGLYSLSSVVTVPSSSLGTQTYICNVNHKPSNTKVDKKVEPKTPLGDTTHTCPPCP

SEQ ID NO: 410 - protein, 120 aa, synthetic construct
  REGION 1..120: note = Artificial Sequence
DKTHTCPPCPAPEAAGGPSVFLFPPKPKDTLMISRTPEVTCVVVDVSHEDPEVKFNWYVDGVEVHNAKTKPREEQYNSTYRVVSVLTVLHQDWLNGKEYKCKVSNKALAAPIEKTISKAK

SEQ ID NO: 411 - protein, 120 aa, synthetic construct
  REGION 1..120: note = Artificial Sequence
DTTHTCPPCPAPEAAGGPSVFLFPPKPKDTLMISRTPEVTCVVVDVSHEDPEVKFNWYVDGVEVHNAKTKPREEQYNSTYRVVSVLTVLHQDWLNGKEYKCKVSNKALAAPIEKTISKAK

SEQ ID NO: 412 - protein, 116 aa, synthetic construct
  REGION 1..116: note = Artificial Sequence
TCPPCPAPEAAGGPSVFLFPPKPKDTLMISRTPEVTCVVVDVSHEDPEVKFNWYVDGVEVHNAKTKPREEQYNSTYRVVSVLTVLHQDWLNGKEYKCKVSNKALAAPIEKTISKAK

SEQ ID NO: 413 - protein, 14 aa, synthetic construct
  REGION 1..14: note = Artificial Sequence
CPPCPAPEAAGGPS

SEQ ID NO: 414 - protein, 19 aa, synthetic construct
  REGION 1..19: note = Artificial Sequence
DKTHTCPPCPAPEAAGGPS

SEQ ID NO: 415 - protein, 120 aa, synthetic construct
  REGION 1..120: note = Artificial Sequence
DKTHTCPPCPAPELLGGPSVFLFPPKPKDTLMISRTPEVTCVVVDVSHEDPEVKFNWYVDGVEVHNAKTKPREEQYNSTYRVVSVLTVLHQDWLNGKEYKCKVSNKALPAPIEKTISKAK

SEQ ID NO: 416 - protein, 106 aa, synthetic construct [sequence omitted]

SEQ ID NO: 417 - protein, 120 aa, synthetic construct; identical to SEQ ID NO: 398
  REGION 1..120: note = Artificial Sequence

SEQ ID NO: 418 - protein, 106 aa, synthetic construct; identical to SEQ ID NO: 401
  REGION 1..106: note = Artificial Sequence

SEQ ID NO: 419 - protein, 106 aa, synthetic construct; identical to SEQ ID NO: 400
  REGION 1..106: note = Artificial Sequence

SEQ ID NO: 420 - protein, 107 aa, synthetic construct [sequence omitted]

SEQ ID NO: 421 - protein, 116 aa, synthetic construct
  REGION 1..116: note = Artificial Sequence
RTVAAPSVFIFPPSDEQLKSGTASVVCLLNNFYPREAKVQWKVDNALQSGNSQESVTEQDSKDSTYSLSSTLTLSKADYEKHKVYACEVTHQGLSSPVTKSFNRGECDKTHTCPPC

SEQ ID NO: 422 - protein, 9 aa, synthetic construct
  REGION 1..9: note = Artificial Sequence
GILGFVFTL

SEQ ID NO: 423 - protein, 14 aa, synthetic construct
  REGION 1..14: note = Artificial Sequence
PKYVKFQNTLKLAT

SEQ ID NO: 424 - protein, 9 aa, synthetic construct
  REGION 1..9: note = Artificial Sequence
SRYWAIRTR

SEQ ID NO: 425 - protein, 9 aa, synthetic construct
  REGION 1..9: note = Artificial Sequence
CTELKLSDY

SEQ ID NO: 426 - protein, 9 aa, synthetic construct
  REGION 1..9: note = Artificial Sequence
ELRSRYWAI

SEQ ID NO: 427 - protein, 9 aa, synthetic construct
  REGION 1..9: note = Artificial Sequence
ILRGSVAHK

SEQ ID NO: 428 - protein, 9 aa, synthetic construct
  REGION 1..9: note = Artificial Sequence
VSDGGPNLY

SEQ ID NO: 429 - protein, 9 aa, synthetic construct
  REGION 1..9: note = Artificial Sequence
FMYSEFHFI

SEQ ID NO: 430 - protein, 9 aa, synthetic construct
  REGION 1..9: note = Artificial Sequence
AIMDKNIIL

SEQ ID NO: 431 - protein, 9 aa, synthetic construct
  REGION 1..9: note = Artificial Sequence
NMLSTVLGV

SEQ ID NO: 432 - protein, 9 aa, synthetic construct
  REGION 1..9: note = Artificial Sequence
FLKDVMESM

SEQ ID NO: 433 - protein, 9 aa, synthetic construct
  REGION 1..9: note = Artificial Sequence
LPFEKSTVM

SEQ ID NO: 434 - protein, 9 aa, synthetic construct
  REGION 1..9: note = Artificial Sequence
FVRQCFNPM

SEQ ID NO: 435 - protein, 10 aa, synthetic construct
  REGION 1..10: note = Artificial Sequence
KLGEFYNQMM

SEQ ID NO: 436 - protein, 15 aa, synthetic construct
  REGION 1..15: note = Artificial Sequence
AVLLSNEGIINSEDE

SEQ ID NO: 437 - protein, 16 aa, synthetic construct
  REGION 1..16: note = Artificial Sequence
AVLLSNEGIINSEDEH

SEQ ID NO: 438 - protein, 8 aa, synthetic construct
  REGION 1..8: note = Artificial Sequence
AYDQSGRL

SEQ ID NO: 439 - protein, 9 aa, synthetic construct
  REGION 1..9: note = Artificial Sequence
AYDQSGRLV

SEQ ID NO: 440 - protein, 10 aa, synthetic construct
  REGION 1..10: note = Artificial Sequence
FPIMHDRTKI

SEQ ID NO: 441 - protein, 15 aa, synthetic construct
  REGION 1..15: note = Artificial Sequence
ITKNLNSLSELEVKN

SEQ ID NO: 442 - protein, 17 aa, synthetic construct
  REGION 1..17: note = Artificial Sequence
ITKNLNSLSELEVKNLQ

SEQ ID NO: 443 - protein, 16 aa, synthetic construct
  REGION 1..16: note = Artificial Sequence
LAVLLSNEGIINSEDE

SEQ ID NO: 444 - protein, 17 aa, synthetic construct
  REGION 1..17: note = Artificial Sequence
LAVLLSNEGIINSEDEH

SEQ ID NO: 445 - protein, 9 aa, synthetic construct
  REGION 1..9: note = Artificial Sequence
LPQSGRIVV

SEQ ID NO: 446 - protein, 9 aa, synthetic construct
  REGION 1..9: note = Artificial Sequence
SYIGSINNI

SEQ ID NO: 447 - protein, 9 aa, synthetic construct
  REGION 1..9: note = Artificial Sequence
NAITNAKII

SEQ ID NO: 448 - protein, 9 aa, synthetic construct
  REGION 1..9: note = Artificial Sequence
KYKNAVTEL

SEQ ID NO: 449 - protein, 24 aa, synthetic construct
  REGION 1..24: note = Artificial Sequence
NSELLSLINDMPITNDQKKLMSNN

SEQ ID NO: 450 - protein, 9 aa, synthetic construct
  REGION 1..9: note = Artificial Sequence
NPKASLLSL

SEQ ID NO: 451 - protein, 9 aa, synthetic construct
  REGION 1..9: note = Artificial Sequence
VYNTVISYI

SEQ ID NO: 452 - protein, 10 aa, synthetic construct
  REGION 1..10: note = Artificial Sequence
TYMLTNSELL

SEQ ID NO: 453 - protein, 13 aa, synthetic construct
  REGION 1..13: note = Artificial Sequence
WAICKRIPNKKPG

SEQ ID NO: 454 - protein, 11 aa, synthetic construct
  REGION 1..11: note = Artificial Sequence
KNRGIIKTFSN

SEQ ID NO: 455 - protein, 6 aa, synthetic construct
  REGION 1..6: note = Artificial Sequence
TLNPTI

SEQ ID NO: 456 - protein, 12 aa, synthetic construct
  REGION 1..12: note = Artificial Sequence
ATLVVNRIRGGF

SEQ ID NO: 457 - protein, 6 aa, synthetic construct
  REGION 1..6: note = Artificial Sequence
LNPTIA

SEQ ID NO: 458 - protein, 12 aa, synthetic construct
  REGION 1..12: note = Artificial Sequence
SANNDAEIGNLI

SEQ ID NO: 459 - protein, 16 aa, synthetic construct
  REGION 1..16: note = Artificial Sequence
PETISDPENRNKPSAE

SEQ ID NO: 460 - protein, 6 aa, synthetic construct
  REGION 1..6: note = Artificial Sequence
AEGQLG

SEQ ID NO: 461 - protein, 9 aa, synthetic construct
  REGION 1..9: note = Artificial Sequence
ARKLLLDNL

SEQ ID NO: 462 - protein, 9 aa, synthetic construct
  REGION 1..9: note = Artificial Sequence
ASFVNPIYL

SEQ ID NO: 463 - protein, 12 aa, synthetic construct
  REGION 1..12: note = Artificial Sequence
DVVDGMNFNRGY

SEQ ID NO: 464 - protein, 9 aa, synthetic construct
  REGION 1..9: note = Artificial Sequence
NMFTPYIGV

SEQ ID NO: 465 - protein, 24 aa, synthetic construct
  REGION 1..24: note = Artificial Sequence
NLVGLIGVKGSSIAADQLPNVGIT

SEQ ID NO: 466 - protein, 10 aa, synthetic construct
  REGION 1..10: note = Artificial Sequence
SGPSNTPPEI

SEQ ID NO: 467 - protein, 9 aa, synthetic construct
  REGION 1..9: note = Artificial Sequence
TDLGQNLLY

SEQ ID NO: 468 - protein, 10 aa, synthetic construct
  REGION 1..10: note = Artificial Sequence
LTDLGQNLLY

SEQ ID NO: 469 - protein, 9 aa, synthetic construct
  REGION 1..9: note = Artificial Sequence
FALSNAEDL

SEQ ID NO: 470 - protein, 15 aa, synthetic construct
  REGION 1..15: note = Artificial Sequence
DEPTLLYVLFEVFDV

SEQ ID NO: 471 - protein, 9 aa, synthetic construct
  REGION 1..9: note = Artificial Sequence
KYSPSNVKI

SEQ ID NO: 472 - protein, 9 aa, synthetic construct
  REGION 1..9: note = Artificial Sequence
MPNRNYIAF

SEQ ID NO: 473 - protein, 15 aa, synthetic construct
  REGION 1..15: note = Artificial Sequence
VDCYINLGARWSLDY

SEQ ID NO: 474 - protein, 9 aa, synthetic construct
  REGION 1..9: note = Artificial Sequence
VNIRNCCYI

SEQ ID NO: 475 - protein, 30 aa, synthetic construct
  REGION 1..30: note = Artificial Sequence
RNFQPMSRQVVDDTKYKDYQQVGILHQHNN

SEQ ID NO: 476 - protein, 9 aa, synthetic construct
  REGION 1..9: note = Artificial Sequence
LPKLTPFAL

SEQ ID NO: 477 - protein, 15 aa, synthetic construct
  REGION 1..15: note = Artificial Sequence
FQRPTISSNSHAIFR

SEQ ID NO: 478 - protein, 10 aa, synthetic construct
  REGION 1..10: note = Artificial Sequence
SGPSNTPPEI

SEQ ID NO: 479 - protein, 9 aa, synthetic construct
  REGION 1..9: note = Artificial Sequence
TDLGQNLLY

SEQ ID NO: 480 - protein, 10 aa, synthetic construct
  REGION 1..10: note = Artificial Sequence
LTDLGQNLLY

SEQ ID NO: 481 - protein, 9 aa, synthetic construct
  REGION 1..9: note = Artificial Sequence
FALSNAEDL

SEQ ID NO: 482 - protein, 15 aa, synthetic construct
  REGION 1..15: note = Artificial Sequence
DEPTLLYVLFEVFDV

SEQ ID NO: 483 - protein, 9 aa, synthetic construct
  REGION 1..9: note = Artificial Sequence
KYSPSNVKI

SEQ ID NO: 484 - protein, 10 aa, synthetic construct
  REGION 1..10: note = Artificial Sequence
MPNRPNYIAF

SEQ ID NO: 485 - protein, 15 aa, synthetic construct
  REGION 1..15: note = Artificial Sequence
VDCYINLGARWSLDY

SEQ ID NO: 486 - protein, 9 aa, synthetic construct
  REGION 1..9: note = Artificial Sequence
LPKLTPFAL

SEQ ID NO: 487 - protein, 15 aa, synthetic construct
  REGION 1..15: note = Artificial Sequence
FQRPTISSNSHAIFR

SEQ ID NO: 488 - protein, 21 aa, synthetic construct
  REGION 1..21: note = Artificial Sequence
GKYTTETFATNSYTPSYIAQE

SEQ ID NO: 489 - protein, 10 aa, synthetic construct
  REGION 1..10: note = Artificial Sequence
DYDDYNIGTT

SEQ ID NO: 490 - protein, 9 aa, synthetic construct
  REGION 1..9: note = Artificial Sequence
KISGVFPNP

SEQ ID NO: 491 - protein, 10 aa, synthetic construct
  REGION 1..10: note = Artificial Sequence
PLAPKESMFN

SEQ ID NO: 492 - protein, 33 aa, synthetic construct
  REGION 1..33: note = Artificial Sequence
ETLLIEDDVSGQGKELGVNLNPAGPITADEQGL

SEQ ID NO: 493 - protein, 9 aa, synthetic construct
  REGION 1..9: note = Artificial Sequence
NLVPMVATV

SEQ ID NO: 494 - protein, 9 aa, synthetic construct
  REGION 1..9: note = Artificial Sequence
GLCTLVAML

SEQ ID NO: 495 - protein, 10 aa, synthetic construct
  REGION 1..10: note = Artificial Sequence
TPRVTGGGAM

SEQ ID NO: 496 - protein, 8 aa, synthetic construct
  REGION 1..8: note = Artificial Sequence
SSIEFARL

SEQ ID NO: 497 - protein, 9 aa, synthetic construct
  REGION 1..9: note = Artificial Sequence
CLGGLLTMV

SEQ ID NO: 498 - protein, 9 aa, synthetic construct
  REGION 1..9: note = Artificial Sequence
FLRGRAYGL

SEQ ID NO: 499 - protein, 9 aa, synthetic construct
  REGION 1..9: note = Artificial Sequence
TPHFMPTNL

SEQ ID NO: 500 - protein, 8 aa, synthetic construct
  REGION 1..8: note = Artificial Sequence
RAKFKQLL

SEQ ID NO: 501 - protein, 9 aa, synthetic construct
  REGION 1..9: note = Artificial Sequence
RPPIFIRRL

SEQ ID NO: 502 - protein, 9 aa, synthetic construct
  REGION 1..9: note = Artificial Sequence
VLEETSVML

SEQ ID NO: 503 - protein, 9 aa, synthetic construct
  REGION 1..9: note = Artificial Sequence
IVTDFSVIK

SEQ ID NO: 504 - protein, 9 aa, synthetic construct
  REGION 1..9: note = Artificial Sequence
IPSINVHHY

SEQ ID NO: 505 - protein, 9 aa, synthetic construct
  REGION 1..9: note = Artificial Sequence
QYDPVAALF

SEQ ID NO: 506 - protein, 11 aa, synthetic construct
  REGION 1..11: note = Artificial Sequence
HPVGEADYFEY

SEQ ID NO: 507 - protein, 9 aa, synthetic construct
  REGION 1..9: note = Artificial Sequence
VTEHDTLLY

SEQ ID NO: 508 - protein, 9 aa, synthetic construct
  REGION 1..9: note = Artificial Sequence
HGIRNASFI

SEQ ID NO: 509 - protein, 10 aa, synthetic construct
  REGION 1..10: note = Artificial Sequence
AVFDRKSDAK

SEQ ID NO: 510 - protein, 9 aa, synthetic construct
  REGION 1..9: note = Artificial Sequence
TPLHEQHGM

SEQ ID NO: 511 - protein, 11 aa, synthetic construct
  REGION 1..11: note = Artificial Sequence
YSEHPTFTSQY

SEQ ID NO: 512 - protein, 9 aa, synthetic construct
  REGION 1..9: note = Artificial Sequence
YVLDHLIVV

SEQ ID NO: 513 - protein, 9 aa, synthetic construct
  REGION 1..9: note = Artificial Sequence
YLLEMLWRL

SEQ ID NO: 514 - protein, 9 aa, synthetic construct
  REGION 1..9: note = Artificial Sequence
FLYALALLL

SEQ ID NO: 515 - protein, 9 aa, synthetic construct
  REGION 1..9: note = Artificial Sequence
QAKWRLQTL

SEQ ID NO: 516 - protein, 9 aa, synthetic construct
  REGION 1..9: note = Artificial Sequence
ELRRKMMYM

SEQ ID NO: 517 - protein, 11 aa, synthetic construct
  REGION 1..11: note = Artificial Sequence
RPHERNGFTVL

SEQ ID NO: 518 - protein, 8 aa, synthetic construct
  REGION 1..8: note = Artificial Sequence
SSIEFARL

SEQ ID NO: 519 - protein, 8 aa, synthetic construct
  REGION 1..8: note = Artificial Sequence
QTFDRGRL

SEQ ID NO: 520 - protein, 16 aa, synthetic construct
  REGION 1..16: note = Artificial Sequence
SLKMADPNRFRGKDLP

SEQ ID NO: 521 - protein, 34 aa, synthetic construct
  REGION 1..34: note = Artificial Sequence
QPPSLPITVYYAVLERACTSVLLNAPSEAPQIVR

SEQ ID NO: 522 - protein, 9 aa, synthetic construct
  REGION 1..9: note = Artificial Sequence
RLNELLAYV

SEQ ID NO: 523 - protein, 9 aa, synthetic construct
  REGION 1..9: note = Artificial Sequence
RMLGDVMAV

SEQ ID NO: 524 - protein, 23 aa, synthetic construct
  REGION 1..23: note = Artificial Sequence
KYALADASLKMADPNRFRGKDLP

SEQ ID NO: 525 - protein, 9 aa, synthetic construct
  REGION 1..9: note = Artificial Sequence
SLPITVTTA

SEQ ID NO: 526 - protein, 8 aa, synthetic construct
  REGION 1..8: note = Artificial Sequence
DPEDSALL

SEQ ID NO: 527 - protein, 9 aa, synthetic construct
  REGION 1..9: note = Artificial Sequence
DYATLGVGV

SEQ ID NO: 528 - protein, 9 aa, synthetic construct
  REGION 1..9: note = Artificial Sequence
RPRGEVRFL

SEQ ID NO: 529 - protein, 8 aa, synthetic construct
  REGION 1..8: note = Artificial Sequence
SSIEFARL

SEQ ID NO: 530 - protein, 15 aa, synthetic construct
  REGION 1..15: note = Artificial Sequence
EEVDMTPADALDDFD

SEQ ID NO: 531 - protein, 9 aa, synthetic construct
  REGION 1..9: note = Artificial Sequence
GLADTVVAC

SEQ ID NO: 532 - protein, 9 aa, synthetic construct
  REGION 1..9: note = Artificial Sequence
ASDSLNNEY

SEQ ID NO: 533 - protein, 13 aa, synthetic construct
  REGION 1..13: note = Artificial Sequence
DFEFEQMFTDAMG

SEQ ID NO: 534 - protein, 10 aa, synthetic construct
  REGION 1..10: note = Artificial Sequence
EVDMTPADAL

SEQ ID NO: 535 - protein, 18 aa, synthetic construct
  REGION 1..18: note = Artificial Sequence
PEEFEGAGDGEPPEDDDS

SEQ ID NO: 536 - protein, 9 aa, synthetic construct
  REGION 1..9: note = Artificial Sequence
FLWEDQTLL

SEQ ID NO: 537 - protein, 10 aa, synthetic construct
  REGION 1..10: note = Artificial Sequence
FLVDAIVRVA

SEQ ID NO: 538 - protein, 20 aa, synthetic construct
  REGION 1..20: note = Artificial Sequence
GPADAPPGSPAPPPPEHRGG

SEQ ID NO: 539 - protein, 9 aa, synthetic construct
  REGION 1..9: note = Artificial Sequence
GPHETITAL

SEQ ID NO: 540 - protein, 23 aa, synthetic construct
  REGION 1..23: note = Artificial Sequence
KYALADPSLKMADPNRFRGKNLP

SEQ ID NO: 541 - protein, 11 aa, synthetic construct
  REGION 1..11: note = Artificial Sequence
NNYGSTIEGLL

SEQ ID NO: 542 - protein, 20 aa, synthetic construct
  REGION 1..20: note = Artificial Sequence
PEEFEGAGDGEPPEDDDSAT

SEQ ID NO: 543 - protein, 20 aa, synthetic construct
  REGION 1..20: note = Artificial Sequence
PPLYATGRLSQAQLMPSPPM

SEQ ID NO: 544 - protein, 12 aa, synthetic construct
  REGION 1..12: note = Artificial Sequence
TQPELVPEDPED

SEQ ID NO: 545 - protein, 15 aa, synthetic construct
  REGION 1..15: note = Artificial Sequence
YTSTLLPPELSDTTN

SEQ ID NO: 546 - protein, 20 aa, synthetic construct
  REGION 1..20: note = Artificial Sequence
DPSLKMADPNRFRGKNLPVL

SEQ ID NO: 547 - protein, 20 aa, synthetic construct
  REGION 1..20: note = Artificial Sequence
PELVPEDPEDSALLEDPAGT

SEQ ID NO: 548 - protein, 9 aa, synthetic construct
  REGION 1..9: note = Artificial Sequence
HGPSLYRTF

SEQ ID NO: 549 - protein, 13 aa, synthetic construct
  REGION 1..13: note = Artificial Sequence
NKRVFCAAVGRLA

SEQ ID NO: 550 - protein, 13 aa, synthetic construct
  REGION 1..13: note = Artificial Sequence
PMRARPRGEVRFL

SEQ ID NO: 551 - protein, 9 aa, synthetic construct
  REGION 1..9: note = Artificial Sequence
VFCAAVGRL

SEQ ID NO: 552 - protein, 15 aa, synthetic construct
  REGION 1..15: note = Artificial Sequence
LGNRLCGPATAAWAG

SEQ ID NO: 553 - protein, 9 aa, synthetic construct
  REGION 1..9: note = Artificial Sequence
NLVPMVATV

SEQ ID NO: 554 - protein, 9 aa, synthetic construct
  REGION 1..9: note = Artificial Sequence
TMYGGISLL

SEQ ID NO: 555 - protein, 9 aa, synthetic construct
  REGION 1..9: note = Artificial Sequence
VLEETSVML

SEQ ID NO: 556 - protein, 10 aa, synthetic construct
  REGION 1..10: note = Artificial Sequence
LDPHAFHLLL

SEQ ID NO: 557 - protein, 9 aa, synthetic construct
  REGION 1..9: note = Artificial Sequence
RIFAELEGV

SEQ ID NO: 558 - protein, 11 aa, synthetic construct
  REGION 1..11: note = Artificial Sequence
RPHERNGFTVL

SEQ ID NO: 559 - protein, 9 aa, synthetic construct
  REGION 1..9: note = Artificial Sequence
VFPTKDVAL

SEQ ID NO: 560 - protein, 9 aa, synthetic construct
  REGION 1..9: note = Artificial Sequence
VLAELVKQI

SEQ ID NO: 561 - protein, 9 aa, synthetic construct
  REGION 1..9: note = Artificial Sequence
VLPHETRLL

SEQ ID NO: 562 - protein, 13 aa, synthetic construct
  REGION 1..13: note = Artificial Sequence
KRLDVCRAKMGYM

SEQ ID NO: 563 - protein, 18 aa, synthetic construct
  REGION 1..18: note = Artificial Sequence
GGGAMAGASTSAGRKRKS

SEQ ID NO: 564 - protein, 9 aa, synthetic construct
  REGION 1..9: note = Artificial Sequence
AALFFFDID

SEQ ID NO: 565 - protein, 15 aa, synthetic construct
  REGION 1..15: note = Artificial Sequence
AGILARNLVPMVATV

SEQ ID NO: 566 - protein, 10 aa, synthetic construct
  REGION 1..10: note = Artificial Sequence
ALFFFDIDLL

SEQ ID NO: 567 - protein, 15 aa, synthetic construct
  REGION 1..15: note = Artificial Sequence
ANETIYNTTLKYGDV

SEQ ID NO: 568 - protein, 15 aa, synthetic construct
  REGION 1..15: note = Artificial Sequence
ARAKKDELRRKMMYM

SEQ ID NO: 569 - protein, 15 aa, synthetic construct
  REGION 1..15: note = Artificial Sequence
ARNLVPMVATVQGQN

SEQ ID NO: 570 - protein, 20 aa, synthetic construct
  REGION 1..20: note = Artificial Sequence
ASTAAPPYTNEQAYQMLLAL

SEQ ID NO: 571 - protein, 9 aa, synthetic construct
  REGION 1..9: note = Artificial Sequence
AVGGAVASV

SEQ ID NO: 572 - protein, 10 aa, synthetic construct
  REGION 1..10: note = Artificial Sequence
DEEEAIVAYT

SEQ ID NO: 573 - protein, 11 aa, synthetic construct
  REGION 1..11: note = Artificial Sequence
DEEEAIVAYTL

SEQ ID NO: 574 - protein, 9 aa, synthetic construct
  REGION 1..9: note = Artificial Sequence
DPVAALFFF

SEQ ID NO: 575 - protein, 9 aa, synthetic construct
  REGION 1..9: note = Artificial Sequence
EEAIVAYTL

SEQ ID NO: 576 - protein, 18 aa, synthetic construct
  REGION 1..18: note = Artificial Sequence
EECQLPSLKIFIAGNSAY

SEQ ID NO: 577 - protein, 10 aa, synthetic construct
  REGION 1..10: note = Artificial Sequence
EEEAIVAYTL

SEQ ID NO: 578 - protein, 8 aa, synthetic construct
  REGION 1..8: note = Artificial Sequence
TSYKFESV

SEQ ID NO: 579 - protein, 8 aa, synthetic construct
  REGION 1..8: note = Artificial Sequence
ITYRFYLI

SEQ ID NO: 580 - protein, 9 aa, synthetic construct
  REGION 1..9: note = Artificial Sequence
ILDDNLYKV

SEQ ID NO: 581 - protein, 9 aa, synthetic construct
  REGION 1..9: note = Artificial Sequence
KVDDTFYYV

SEQ ID NO: 582 - protein, 9 aa, synthetic construct
  REGION 1..9: note = Artificial Sequence
AAFEFINSL

SEQ ID NO: 583 - protein, 8 aa, synthetic construct
  REGION 1..8: note = Artificial Sequence
KSYNYMLL

SEQ ID NO: 584 - protein, 9 aa, synthetic construct
  REGION 1..9: note = Artificial Sequence
MPAYIRNTL

SEQ ID NO: 585 - protein, 9 aa, synthetic construct
  REGION 1..9: note = Artificial Sequence
RVYEALYYV

SEQ ID NO: 586 - protein, 9 aa, synthetic construct
  REGION 1..9: note = Artificial Sequence
IGMFNLTFI

SEQ ID NO: 587 - protein, 9 aa, synthetic construct
  REGION 1..9: note = Artificial Sequence
SLSAYIIRV

SEQ ID NO: 588 - protein, 9 aa, synthetic construct
  REGION 1..9: note = Artificial Sequence
LMYDIINSV

SEQ ID NO: 589 - protein, 9 aa, synthetic construct
  REGION 1..9: note = Artificial Sequence
RLYDYFTRV

SEQ ID NO: 590 - protein, 10 aa, synthetic construct
  REGION 1..10: note = Artificial Sequence
YSLPNAGDVI

SEQ ID NO: 591 - protein, 9 aa, synthetic construct
  REGION 1..9: note = Artificial Sequence
YSQVNKRYI

SEQ ID NO: 592 - protein, 9 aa, synthetic construct
  REGION 1..9: note = Artificial Sequence
VSLDYINTM

SEQ ID NO: 593 - protein, 9 aa, synthetic construct
  REGION 1..9: note = Artificial Sequence
TLPEVISTI

SEQ ID NO: 594 - protein, 9 aa, synthetic construct
  REGION 1..9: note = Artificial Sequence
FLTSVINRV

SEQ ID NO: 595 - protein, 9 aa, synthetic construct
  REGION 1..9: note = Artificial Sequence
GFFDFVNFV

SEQ ID NO: 596 - protein, 9 aa, synthetic construct
  REGION 1..9: note = Artificial Sequence
VLYDEFVTI

SEQ ID NO: 597 - protein, 9 aa, synthetic construct
  REGION 1..9: note = Artificial Sequence
FPYEGGKVF

SEQ ID NO: 598 - protein, 9 aa, synthetic construct
  REGION 1..9: note = Artificial Sequence
LMDENTYAM

SEQ ID NO: 599 - protein, 10 aa, synthetic construct
  REGION 1..10: note = Artificial Sequence
NLFDIPLLTV

SEQ ID NO: 600 - protein, 9 aa, synthetic construct
  REGION 1..9: note = Artificial Sequence
VGPSNSPTF

SEQ ID NO: 601 - protein, 9 aa, synthetic construct
  REGION 1..9: note = Artificial Sequence
YAPVSPIVI

SEQ ID NO: 602 - protein, 9 aa, synthetic construct
  REGION 1..9: note = Artificial Sequence
HVDGKILFV

SEQ ID NO: 603 - protein, 8 aa, synthetic construct
  REGION 1..8: note = Artificial Sequence
AAFEFRDL

SEQ ID NO: 604 - protein, 8 aa, synthetic construct
  REGION 1..8: note = Artificial Sequence
AIIKYTDL

SEQ ID NO: 605 - protein, 8 aa, synthetic construct
  REGION 1..8: note = Artificial Sequence
AIYAFRLT

SEQ ID NO: 606 - protein, 9 aa, synthetic construct
  REGION 1..9: note = Artificial Sequence
AIYGFGVTF

SEQ ID NO: 607 - protein, 9 aa, synthetic construct
  REGION 1..9: note = Artificial Sequence
ANVDFMEYV

SEQ ID NO: 608 - protein, 8 aa, synthetic construct
  REGION 1..8: note = Artificial Sequence
EQFSFSNV

SEQ ID NO: 609 - protein, 15 aa, synthetic construct
  REGION 1..15: note = Artificial Sequence
TYTFGEHKQEKDLEY

SEQ ID NO: 610 - protein, 15 aa, synthetic construct
  REGION 1..15: note = Artificial Sequence
TEDSHPPYKQTQPGA

SEQ ID NO: 611 - protein, 15 aa, synthetic construct
  REGION 1..15: note = Artificial Sequence
PESRESLAWQTATNP

SEQ ID NO: 612 - protein, 10 aa, synthetic construct
  REGION 1..10: note = Artificial Sequence
FGEHKQEKDL

SEQ ID NO: 613 - protein, 15 aa, synthetic construct
  REGION 1..15: note = Artificial Sequence
AGGTGTEDSHPPYKQ

SEQ ID NO: 614 - protein, 10 aa, synthetic construct
  REGION 1..10: note = Artificial Sequence
FGEHKQEKDL

SEQ ID NO: 615 - protein, 15 aa, synthetic construct
  REGION 1..15: note = Artificial Sequence
AGGTGTEDSHPPYKQ

SEQ ID NO: 616 - protein, 15 aa, synthetic construct
  REGION 1..15: note = Artificial Sequence
FGEHKQEKDLEYGAC

SEQ ID NO: 617 - protein, 15 aa, synthetic construct
  REGION 1..15: note = Artificial Sequence
HYRAHARDGVFDYYT

SEQ ID NO: 618 - protein, 5 aa, synthetic construct
  REGION 1..5: note = Artificial Sequence
KQEDK

SEQ ID NO: 619 - protein, 15 aa, synthetic construct
  REGION 1..15: note = Artificial Sequence
GDPIADMIDQTVNNQ

SEQ ID NO: 620 - protein, 15 aa, synthetic construct
  REGION 1..15: note = Artificial Sequence
YPTFGEHLQANDLDY

SEQ ID NO: 621 - protein, 9 aa, synthetic construct
  REGION 1..9: note = Artificial Sequence
LEGTTNPNT

SEQ ID NO: 622 - protein, 16 aa, synthetic construct
  REGION 1..16: note = Artificial Sequence
VSSHRLDDTGEVPALQ

SEQ ID NO: 623 - protein, 10 aa, synthetic construct
  REGION 1..10: note = Artificial Sequence
RIYMRMKHVR

SEQ ID NO: 624 - protein, 10 aa, synthetic construct
  REGION 1..10: note = Artificial Sequence
TSKSKYPLVV

SEQ ID NO: 625 - protein, 15 aa, synthetic construct
  REGION 1..15: note = Artificial Sequence
DGYPTFGEHKQEKDL

SEQ ID NO: 626 - protein, 9 aa, synthetic construct
  REGION 1..9: note = Artificial Sequence
YMYAVSGAL

SEQ ID NO: 627 - protein, 12 aa, synthetic construct
  REGION 1..12: note = Artificial Sequence
FWRGDLVFDFQV

SEQ ID NO: 628 - protein, 23 aa, synthetic construct
  REGION 1..23: note = Artificial Sequence
MNMSKQGIFQTVGSGLDHILSLA

SEQ ID NO: 629 - protein, 15 aa, synthetic construct
  REGION 1..15: note = Artificial Sequence
TVSTEQNVPDPQVGI

SEQ ID NO: 630 - protein, 20 aa, synthetic construct
  REGION 1..20: note = Artificial Sequence
ASICQMFCFWRGDLVFDFQV

SEQ ID NO: 631 - protein, 20 aa, synthetic construct
  REGION 1..20: note = Artificial Sequence
DHMSIYKFMGRSHFLCTFTF

SEQ ID NO: 632 - protein, 20 aa, synthetic construct
  REGION 1..20: note = Artificial Sequence
FPELKPGESTHTSDHMSIYK

SEQ ID NO: 633 - protein, 724 aa, synthetic construct
  REGION 1..724: note = Artificial Sequence
DIVMTQTPLSLPVTPGEPASISCRSSKSLLHSNGITYLYWYLQKPGQSPQLLIYQMSNLVSGVPDRFSGSGSGTDFTLKISRVEAEDVGVYYCAQNLELPYTFGGGTKVEIKGGSGGDIVMTQTPLSLPVTPGEPASISCRSSKSLLHSNGITYLYWYLQKPGQSPQLLIYQMSNLVSGVPDRFSGSGSGTDFTLKISRVEAEDVGVYYCAQNLELPYTFGGGTKVEIKGSGGSAGSGSGGGGSASGSGQVQLVQSGAEVKKPGSSVKVSCKASGYAFSYSWINWVRQAPGQGLEWMGRIFPGDGDTDYNGKFKGRVTITADKSTSTAYMELSSLRSEDTAVYYCARNVFDGYWLVYWGQGTLVTVSSGGSGGQVQLVQSGAEVKKPGSSVKVSCKASGYAFSYSWINWVRQAPGQGLEWMGRIFPGDGDTDYNGKFKGRVTITADKSTSTAYMELSSLRSEDTAVYYCARNVFDGYWLVYWGQGTLVTVSSASGGSGDKTHTCPPCPAPEAAGGPSVFLFPPKPKDTLMISRTPEVTCVVVDVSHEDPEVKFNWYVDGVEVHNAKTKPREEQYNSTYRVVSVLTVLHQDWLNGKEYKCKVSNKALAAPIEKTISKAKGQPREPQVYTLPPCRDELTKNQVSLWCLVKGFYPSDIAVEWESNGQPENNYKTTPPVLDSDGSFFLYSKLTVDKSRWQQGNVFSCSVMHEALHNHYTQKSLSLSPG

SEQ ID NO: 634 - DNA, 2172 bp, synthetic construct
  misc_feature 1..2172: note = Artificial Sequence
  source 1..2172: mol_type = other DNA
gacatcgtgatgacccagacacctctgagcctgcctgtgacacctggcgaacctgccagcatcagctgcagaagcagcaagagcctgctgcacagcaacggcatcacctacctgtactggtatctgcagaaacccggccagtctcctcagctgctgatctaccagatgagcaacctggtgtccggcgtgcccgatagattttctggcagcggctctggcaccgacttcaccctgaagattagcagagtggaagccgaggacgtgggcgtgtactactgtgcccagaacctggaactgccctacacctttggcggaggcaccaaggtggaaatcaagggcggatctggcggcgatattgtcatgactcagaccccactgtctctgcccgtgactccaggggaaccagcctccatctcttgcagatccagcaagtctctgctgcactctaatgggatcacatacctctattggtatctccaaaagcctgggcagagcccacagctcctcatctatcagatgtctaatctcgtgtctggggtgcccgacaggtttagcggttctggaagcggcacagatttcacactgaaaatctccagagtcgaggccgaagatgtgggagtctattattgcgcccagaatctcgagctgccttataccttcggaggcggaacaaaggtcgagatcaaaggttctggcggcagcgccggaagtggtagtggtggcggaggatctgcttctggctctggacaggttcagctggttcagtctggcgccgaagtgaagaaacctggcagcagcgtgaaggtgtcctgcaaggcctctggctacgccttcagctacagctggatcaactgggtccgacaggcccctggacaaggcttggaatggatgggcagaatcttccccggcgacggcgacaccgattacaacggcaagttcaagggcagagtgaccatcaccgccgacaagagcacaagcaccgcctacatggaactgagcagcctgagaagcgaggacaccgccgtgtactactgcgccagaaacgtgttcgacggctactggctggtgtattggggccagggaacactggtcacagtgtccagcggcggaagcggaggacaggttcaactggtgcaaagcggagctgaagtgaaaaagcccggctcctccgtgaaagtgtcttgtaaagccagcggctacgctttctcctactcctggattaactgggttcgccaagctccaggccagggccttgagtggatgggacgaatttttcctggcgacggggatacagactacaatgggaagttcaaaggccgggtcacaatcacagccgataagtccacctccacagcttatatggaactgtctagcctgcgctccgaggatacagccgtctattactgtgctcgcaatgtctttgatggctattggctcgtctactggggacagggcacactcgtgacagtgtcctctgcttctggcggctccggagataagacccacacatgtcctccatgtcctgctccagaagctgctggcggcccttctgtgttcctgtttcctccaaagcctaaggacaccctgatgatcagcagaacccctgaagtgacctgcgtggtggtggatgtgtctcacgaggaccccgaagtgaagttcaattggtacgtggacggcgtggaagtgcacaacgccaagaccaagcctagagaggaacagtacaacagcacctacagagtggtgtccgtgctgaccgtgctgcaccaggattggctgaacggcaaagagtacaagtgcaaggtgtccaacaaggccctggccgctcctatcgagaaaaccatcagcaaggccaagggccagcctagggaaccccaggtttacacccttcctccatgccgggatgagctgaccaagaaccaggtgtccctgtggtgtctcgtgaagggcttctaccccagcgacattgccgtggaatgggagagcaatggccagcctgagaacaactacaagacaacccctcctgtgctggacagcgacggctcattcttcctgtacagcaagctgacagtcgacaagtccagatggcagcagggcaacgtgttcagttgcagcgtgatgcacgaggccctgcacaaccactacacccagaagtccctgagcctgtctcctgga

SEQ ID NO: 635 - protein, 727 aa, synthetic construct
  REGION 1..727: note = Artificial Sequence
QAVVTQEPSLTVSPGGTVTLTCGSSTGAVTTSNYANWVQEKPGQAFRGLIGGTNKRAPGTPARFSGSLLGGKAALTLSGAQPEDEAEYYCALWYSNLWVFGGGTKLTVLGGSGGDIVMTQTPLSLPVTPGEPASISCRSSKSLLHSNGITYLYWYLQKPGQSPQLLIYQMSNLVSGVPDRFSGSGSGTDFTLKISRVEAEDVGVYYCAQNLELPYTFGGGTKVEIKGSGGSAGSGSGGGGSASGSGQVQLVQSGAEVKKPGSSVKVSCKASGYAFSYSWINWVRQAPGQGLEWMGRIFPGDGDTDYNGKFKGRVTITADKSTSTAYMELSSLRSEDTAVYYCARNVFDGYWLVYWGQGTLVTVSSGGSGGEVQLLESGGGLVQPGGSLRLSCAASGFTFSTYAMNWVRQAPGKGLEWVSRIRSKYNNYATYYADSVKGRFTISRDDSKNTLYLQMNSLRAEDTAVYYCVRHGNFGNSYVSWFAYWGQGTLVTVSSASGGSGDKTHTCPPCPAPEAAGGPSVFLFPPKPKDTLMISRTPEVTCVVVDVSHEDPEVKFNWYVDGVEVHNAKTKPREEQYNSTYRVVSVLTVLHQDWLNGKEYKCKVSNKALAAPIEKTISKAKGQPREPQVCTLPPSRDELTKNQVSLSCAVKGFYPSDIAVEWESNGQPENNYKTTPPVLDSDGSFFLVSKLTVDKSRWQQGNVFSCSVMHEALHNHYTQKSLSLSPG

SEQ ID NO: 636 - DNA, 2181 bp, synthetic construct
  misc_feature 1..2181: note = Artificial Sequence
  source 1..2181: mol_type = other DNA
caggccgtggttacacaagagccttctctgaccgtgtctcctggcggcacagtgacactgacatgtggcagttctacaggcgccgtgaccaccagcaattacgccaactgggtgcaagagaagccaggccaggccttcagaggactgatcggcggcacaaacaagagagcccctggaacaccagccagattcagcggatctctgctcggaggaaaggccgcactgacactgtctggtgcccagcctgaagatgaggccgagtactattgcgccctgtggtacagcaacctgtgggttttcggaggcggcaccaagctgacagtgcttggcggatctggcggcgacatcgtgatgacccagacacctctgagcctgcctgtgacacctggcgaacctgccagcatcagctgcagaagcagcaagagcctgctgcacagcaacggcatcacctacctgtactggtatctgcagaaacccggccagtctcctcagctgctgatctaccagatgagcaacctggtgtccggcgtgcccgatagattttctggcagcggctctggcaccgacttcaccctgaagattagcagagtggaagccgaggacgtgggcgtgtactactgtgcccagaacctggaactgccctacacctttggcggaggcaccaaggtggaaatcaaaggttctggcggcagcgccggaagtggtagtggtggcggaggatctgcttctggctctggacaggttcagctggttcagtctggcgccgaagtgaagaaacctggcagcagcgtgaaggtgtcctgcaaggcctctggctacgccttcagctacagctggatcaactgggtccgacaggcccctggacaaggcttggaatggatgggcagaatcttccccggcgacggcgacaccgattacaacggcaagttcaagggcagagtgaccatcaccgccgacaagagcacaagcaccgcctacatggaactgagcagcctgagaagcgaggacaccgccgtgtactactgcgccagaaacgtgttcgacggctactggctggtgtattggggccagggaacactggtcacagtgtccagcggcggaagcggaggagaagtgcagctgctggaatctggcggaggactggttcaacctggcggctctctgagactgtcttgtgccgccagcggcttcacctttagcacctacgccatgaactgggtccgacaggcccctggcaaaggccttgaatgggtgtcccggatcagaagcaagtacaacaactacgccacctactacgccgacagcgtgaagggcagattcaccatcagccgggacgacagcaagaacaccctgtacctgcagatgaacagcctgagagccgaggacaccgccgtgtactattgtgtgcggcacggcaacttcggcaacagctatgtgtcttggtttgcctactggggccagggcacactggtcacagttagctctgcttctggaggctccggagataagacccacacatgtcctccatgtcctgctccagaggctgctggtggcccttccgtgtttctgttccctccaaagcctaaggacaccctgatgatcagcaggacccctgaagtgacctgcgtggtggtggatgtgtctcacgaggacccagaagtgaagttcaattggtacgtggacggcgtggaagtgcacaacgccaagaccaagcctagagaggaacagtacaacagcacctacagagtggtgtccgtgctgaccgtgctgcaccaggattggctgaacggcaaagagtacaagtgcaaggtgtccaacaaggccctggccgctcctatcgagaaaaccatcagcaaggccaagggccagcctcgcgaacctcaagtctgtacactgcctcctagccgggacgagctgaccaagaatcaggtgtcactgagctgcgccgtgaagggcttttaccccagcgacattgccgtggaatgggagagcaatggccagccagagaacaactacaagacaacccctcctgtgctggacagcgacggctcatttttcctggtgtccaagctgacagtggacaagagcagatggcagcagggcaacgtgttcagctgcagcgtgatgcacgaggccctgcacaaccactacacccagaaaagcctgtctctgagccctggc

SEQ ID NO: 637 - protein, 724 aa, synthetic construct; identical to SEQ ID NO: 633
  REGION 1..724: note = Artificial Sequence

SEQ ID NO: 638 - DNA, 2172 bp, synthetic construct; identical to SEQ ID NO: 634
  misc_feature 1..2172: note = Artificial Sequence
  source 1..2172: mol_type = other DNA

SEQ ID NO: 639 - protein, 727 aa, synthetic construct
  REGION 1..727: note = Artificial Sequence
DIVMTQTPLSLPVTPGEPASISCRSSKSLLHSNGITYLYWYLQKPGQSPQLLIYQMSNLVSGVPDRFSGSGSGTDFTLKISRVEAEDVGVYYCAQNLELPYTFGGGTKVEIKGGSGGQAVVTQEPSLTVSPGGTVTLTCGSSTGAVTTSNYANWVQEKPGQAFRGLIGGTNKRAPGTPARFSGSLLGGKAALTLSGAQPEDEAEYYCALWYSNLWVFGGGTKLTVLGSGGSAGSGSGGGGSASGSGEVQLLESGGGLVQPGGSLRLSCAASGFTFSTYAMNWVRQAPGKGLEWVSRIRSKYNNYATYYADSVKGRFTISRDDSKNTLYLQMNSLRAEDTAVYYCVRHGNFGNSYVSWFAYWGQGTLVTVSSGGSGGQVQLVQSGAEVKKPGSSVKVSCKASGYAFSYSWINWVRQAPGQGLEWMGRIFPGDGDTDYNGKFKGRVTITADKSTSTAYMELSSLRSEDTAVYYCARNVFDGYWLVYWGQGTLVTVSSASGGSGDKTHTCPPCPAPEAAGGPSVFLFPPKPKDTLMISRTPEVTCVVVDVSHEDPEVKFNWYVDGVEVHNAKTKPREEQYNSTYRVVSVLTVLHQDWLNGKEYKCKVSNKALAAPIEKTISKAKGQPREPQVCTLPPSRDELTKNQVSLSCAVKGFYPSDIAVEWESNGQPENNYKTTPPVLDSDGSFFLVSKLTVDKSRWQQGNVFSCSVMHEALHNHYTQKSLSLSPG

SEQ ID NO: 640 - DNA, 2181 bp, synthetic construct
  misc_feature 1..2181: note = Artificial Sequence
  source 1..2181: mol_type = other DNA
gacatcgtgatgacccagacacctctgagcctgcctgtgacacctggcgaacctgccagcatcagctgcagaagcagcaagagcctgctgcacagcaacggcatcacctacctgtactggtatctgcagaaacccggccagtctcctcagctgctgatctaccagatgagcaacctggtgtccggcgtgcccgatagattttctggcagcggctctggcaccgacttcaccctgaagattagcagagtggaagccgaggacgtgggcgtgtactactgtgcccagaacctggaactgccctacacctttggcggaggcaccaaggtggaaatcaaaggcggatctggcggccaggccgtggttacacaagagccttctctgaccgtgtctcctggcggcacagtgacactgacatgtggcagttctacaggcgccgtgaccaccagcaattacgccaactgggtgcaagagaagccaggccaggccttcagaggactgatcggcggcacaaacaagagagcccctggaacaccagccagattcagcggatctctgctcggaggaaaggccgcactgacactgtctggtgcccagcctgaagatgaggccgagtactattgcgccctgtggtacagcaacctgtgggttttcggaggcggcaccaagctgacagtgcttggttctggcggcagcgccggaagtggtagtggtggcggaggatctgcttctggctctggagaagtgcagctgctggaatctggcggaggactggttcaacctggcggctctctgagactgtcttgtgccgccagcggcttcacctttagcacctacgccatgaactgggtccgacaggcccctggcaaaggccttgaatgggtgtcccggatcagaagcaagtacaacaactacgccacctactacgccgacagcgtgaagggcagattcaccatcagccgggacgacagcaagaacaccctgtacctgcagatgaacagcctgagagccgaggacaccgccgtgtactattgtgtgcggcacggcaacttcggcaacagctatgtgtcttggtttgcctactggggccagggcacactggtcacagttagctctggcggaagcggaggacaggttcagctggttcagtctggcgccgaagtgaagaaacctggcagcagcgtgaaggtgtcctgcaaggcctctggctacgccttcagctacagctggatcaactgggtccgacaggcccctggacaaggcttggaatggatgggcagaatcttccccggcgacggcgacaccgattacaacggcaagttcaagggcagagtgaccatcaccgccgacaagagcacaagcaccgcctacatggaactgagcagcctgagaagcgaggacaccgccgtgtactactgcgccagaaacgtgttcgacggctactggctggtgtattggggccagggaacactggtcacagtgtccagcgcttctggaggctccggagataagacccacacatgtcctccatgtcctgctccagaggctgctggtggcccttccgtgtttctgttccctccaaagcctaaggacaccctgatgatcagcaggacccctgaagtgacctgcgtggtggtggatgtgtctcacgaggacccagaagtgaagttcaattggtacgtggacggcgtggaagtgcacaacgccaagaccaagcctagagaggaacagtacaacagcacctacagagtggtgtccgtgctgaccgtgctgcaccaggattggctgaacggcaaagagtacaagtgcaaggtgtccaacaaggccctggccgctcctatcgagaaaaccatcagcaaggccaagggccagcctcgcgaacctcaagtctgtacactgcctcctagccgggacgagctgaccaagaatcaggtgtcactgagctgcgccgtgaagggcttttaccccagcgacattgccgtggaatgggagagcaatggccagccagagaacaactacaagacaacccctcctgtgctggacagcgacggctcatttttcctggtgtccaagctgacagtggacaagagcagatggcagcagggcaacgtgttcagctgcagcgtgatgcacgaggccctgcacaaccactacacccagaaaagcctgtctctgagccctggc

SEQ ID NO: 641 - protein, 722 aa, synthetic construct
  REGION 1..722: note = Artificial Sequence
DIVMTQTPLSLPVTPGEPASISCRSSKSLLHSNGITYLYWYLQKPGQSPQLLIYQMSNLVSGVPDRFSGSGSGTDFTLKISRVEAEDVGVYYCAQNLELPYTFGGGTKVEIKGGSGGSYVLTQPPSVSVAPGQTARITCGGNNIGSKSVHWYQQPPGQAPVVVVYDDSDRPSGIPERFSGSNSGNTATLTISRVEAGDEAVYYCQVWDSSSDHVVFGGGTKLTVLGSGGSAGSGSGGGGSASGSGQLQLQESGPGLVKPSETLSLTCTVSGGSISSGSYFWGWIRQPPGKGLEWIGSIYYSGITYYNPSLKSRVTISVDTSKNQFSLKLSSVTAADTAVYYCARHDGAVAGLFDYWGQGTLVTVSSGGSGGQVQLVQSGAEVKKPGSSVKVSCKASGYAFSYSWINWVRQAPGQGLEWMGRIFPGDGDTDYNGKFKGRVTITADKSTSTAYMELSSLRSEDTAVYYCARNVFDGYWLVYWGQGTLVTVSSASGGSGDKTHTCPPCPAPEAAGGPSVFLFPPKPKDTLMISRTPEVTCVVVDVSHEDPEVKFNWYVDGVEVHNAKTKPREEQYNSTYRVVSVLTVLHQDWLNGKEYKCKVSNKALAAPIEKTISKAKGQPREPQVYTLPPCRDELTKNQVSLWCLVKGFYPSDIAVEWESNGQPENNYKTTPPVLDSDGSFFLYSKLTVDKSRWQQGNVFSCSVMHEALHNHYTQKSLSLSPG

SEQ ID NO: 642 - DNA, 2166 bp, synthetic construct
  misc_feature 1..2166: note = Artificial Sequence
  source 1..2166: mol_type = other DNA
gacatcgtgatgacccagacacctctgagcctgcctgtgacacctggcgaacctgccagcatcagctgcagaagcagcaagagcctgctgcacagcaacggcatcacctacctgtactggtatctgcagaaacccggccagtctcctcagctgctgatctaccagatgagcaacctggtgtccggcgtgcccgatagattttctggcagcggctctggcaccgacttcaccctgaagattagcagagtggaagccgaggacgtgggcgtgtactactgtgcccagaacctggaactgccctacacctttggcggaggcaccaaggtggaaatcaagggcggatctggcggcagctacgtgctgacacaacctccatctgtgtctgtggcccctggccagacagccagaattacatgcggcggcaacaacatcggcagcaagtccgtgcattggtatcagcagcctccaggacaggctcctgtggtggtggtgtacgacgacagcgatagacctagcggcatccccgagagattcagcggcagcaatagcggcaataccgccacactgaccatcagcagagttgaggctggcgacgaggccgtgtactattgccaagtgtgggacagcagcagcgatcacgtggtgtttggcggcggaacaaagctgacagtgctcggttctggcggcagcgccggaagtggtagtggtggcggaggatctgcttctggctctggacagctccagctgcaagagtctggccctggactggtcaagcctagcgagacactgagcctgacatgtaccgtgtctggcggcagcatctccagcggctcctatttctggggctggatcagacaacctcctggcaaaggcctggaatggatcggctccatctactacagcggaatcacctactacaaccccagcctgaagtccagagtgaccatctccgtggacaccagcaagaaccagttctccctgaagctgagcagcgtgacagccgccgataccgccgtctattactgcgccagacatgatggcgctgtggccggcctgtttgattattggggacagggcaccctggtcaccgttagcagcggcggaagcggaggacaggttcagctggttcagtctggcgccgaagtgaagaaacctggcagcagcgtgaaggtgtcctgcaaggcctctggctacgccttcagctacagctggatcaactgggtccgacaggcccctggacaaggcttggaatggatgggcagaatcttccccggcgacggcgacaccgattacaacggcaagttcaagggcagagtgaccatcaccgccgacaagagcacaagcaccgcctacatggaactgagcagcctgagaagcgaggacaccgccgtgtactactgcgccagaaacgtgttcgacggctactggctggtgtattggggccagggaacactggtcacagtgtccagcgcttctggaggctccggagataagacccacacatgtcctccatgtcctgctccagaagctgctggcggcccttctgtgttcctgtttcctccaaagcctaaggacaccctgatgatcagcagaacccctgaagtgacctgcgtggtggtggatgtgtctcacgaggaccccgaagtgaagttcaattggtacgtggacggcgtggaagtgcacaacgccaagaccaagcctagagaggaacagtacaacagcacctacagagtggtgtccgtgctgaccgtgctgcaccaggattggctgaacggcaaagagtacaagtgcaaggtgtccaacaaggccctggccgctcctatcgagaaaaccatcagcaaggccaagggccagcctagggaaccccaggtttacacccttcctccatgccgggatgagctgaccaagaaccaggtgtccctgtggtgtctcgtgaagggcttctaccccagcgacattgccgtggaatgggagagcaatggccagcctgagaacaactacaagacaacccctcctgtgctggacagcgacggctcattcttcctgtacagcaagctgacagtcgacaagtccagatggcagcagggcaacgtgttcagttgcagcgtgatgcacgaggccctgcacaaccactacacccagaagtccctgagcctgtctcctgga

SEQ ID NO: 643 - protein, 723 aa, synthetic construct
  REGION 1..723: note = Artificial Sequence
QAVVTQEPSLTVSPGGTVTLTCGSSTGAVTTSNYANWVQEKPGQAFRGLIGGTNKRAPGTPARFSGSLLGGKAALTLSGAQPEDEAEYYCALWYSNLWVFGGGTKLTVLGGSGGDIQMTQSPSSLSASVGDRVTITCHASQNIYVWLNWYQQKPGKAPKLLIYKASNLHTGVPSRFSGSGSGTDFTLTISSLQPEDFATYYCQQGQTYPYTFGGGTKVEIKGSGGSAGSGSGGGGSASGSGQVQLVQSGAEVKKPGASVKVSCKASGYTFTSYYIHWVRQAPGQGLEWIGSIYPGNVNTNYNEKFKDRATLTVDTSISTAYMELSRLRSDDTAVYFCTRSHYGLDWNFDVWGQGTTVTVSSGGSGGEVQLLESGGGLVQPGGSLRLSCAASGFTFSTYAMNWVRQAPGKGLEWVSRIRSKYNNYATYYADSVKGRFTISRDDSKNTLYLQMNSLRAEDTAVYYCVRHGNFGNSYVSWFAYWGQGTLVTVSSASGGSGDKTHTCPPCPAPEAAGGPSVFLFPPKPKDTLMISRTPEVTCVVVDVSHEDPEVKFNWYVDGVEVHNAKTKPREEQYNSTYRVVSVLTVLHQDWLNGKEYKCKVSNKALAAPIEKTISKAKGQPREPQVCTLPPSRDELTKNQVSLSCAVKGFYPSDIAVEWESNGQPENNYKTTPPVLDSDGSFFLVSKLTVDKSRWQQGNVFSCSVMHEALHNHYTQKSLSLSPG

SEQ ID NO: 644 - DNA, 2169 bp, synthetic construct
  misc_feature 1..2169: note = Artificial Sequence
  source 1..2169: mol_type = other DNA
caggccgtggttacacaagagccttctctgaccgtgtctcctggcggcacagtgacactgacatgtggcagttctacaggcgccgtgaccaccagcaattacgccaactgggtgcaagagaagccaggccaggccttcagaggactgatcggcggcacaaacaagagagcccctggaacaccagccagattcagcggatctctgctcggaggaaaggccgcactgacactgtctggtgcccagcctgaagatgaggccgagtactattgcgccctgtggtacagcaacctgtgggttttcggaggcggcaccaagctgacagtgcttggcggatctggcggcgacatccagatgacacagagccctagcagcctgtctgccagcgtgggagacagagtgaccatcacatgtcacgccagccagaacatctacgtgtggctgaactggtatcagcagaagcccggcaaggcccctaagctgctgatctacaaggccagcaatctgcacaccggcgtgcccagcagattttctggctctggcagcggcaccgacttcaccctgaccatatctagcctgcagcctgaggacttcgccacctactattgtcagcagggccagacatacccctacacctttggcggcggaacaaaggtggaaatcaagggttctggcggcagcgccggaagtggtagtggtggcggaggatctgcttctggctctggacaggttcagctggttcagtctggcgccgaagtgaagaaacctggcgcctctgtgaaggtgtcctgcaaggccagcggctacacctttaccagctactacatccactgggtccgacaggcccctggacaaggactggaatggatcggcagcatctaccccggcaacgtgaacaccaactacaacgagaagttcaaggaccgggccacactgaccgtggacacctctatcagcaccgcctacatggaactgagccggctgagatccgatgataccgccgtgtacttctgcaccagaagccactacggcctggactggaacttcgatgtgtggggccagggcaccaccgtgacagtttcttctggcggaagcggaggagaagtgcagctgctggaatctggcggaggactggttcaacctggcggctctctgagactgtcttgtgccgccagcggcttcacctttagcacctacgccatgaactgggtccgacaggcccctggcaaaggccttgaatgggtgtcccggatcagaagcaagtacaacaactacgccacctactacgccgacagcgtgaagggcagattcaccatcagccgggacgacagcaagaacaccctgtacctgcagatgaacagcctgagagccgaggacaccgccgtgtactattgtgtgcggcacggcaacttcggcaacagctatgtgtcttggtttgcctactggggccagggcacactggtcacagttagctctgcttctggaggctccggagataagacccacacatgtcctccatgtcctgctccagaggctgctggtggcccttccgtgtttctgttccctccaaagcctaaggacaccctgatgatcagcaggacccctgaagtgacctgcgtggtggtggatgtgtctcacgaggacccagaagtgaagttcaattggtacgtggacggcgtggaagtgcacaacgccaagaccaagcctagagaggaacagtacaacagcacctacagagtggtgtccgtgctgaccgtgctgcaccaggattggctgaacggcaaagagtacaagtgcaaggtgtccaacaaggccctggccgctcctatcgagaaaaccatcagcaaggccaagggccagcctcgcgaacctcaagtctgtacactgcctcctagccgggacgagctgaccaagaatcaggtgtcactgagctgcgccgtgaagggcttttaccccagcgacattgccgtggaatgggagagcaatggccagccagagaacaactacaagacaacccctcctgtgctggacagcgacggctcatttttcctggtgtccaagctgacagtggacaagagcagatggcagcagggcaacgtgttcagctgcagcgtgatgcacgaggccctgcacaaccactacacccagaaaagcctgtctctgagccctggc

SEQ ID NO: 645 - protein, 722 aa, synthetic construct; identical to SEQ ID NO: 641
  REGION 1..722: note = Artificial Sequence

SEQ ID NO: 646 - DNA, 2166 bp, synthetic construct; identical to SEQ ID NO: 642
  misc_feature 1..2166: note = Artificial Sequence
  source 1..2166: mol_type = other DNA

SEQ ID NO: 647 - protein, 723 aa, synthetic construct
  REGION 1..723: note = Artificial Sequence
DIQMTQSPSSLSASVGDRVTITCHASQNIYVWLNWYQQKPGKAPKLLIYKASNLHTGVPSRFSGSGSGTDFTLTISSLQPEDFATYYCQQGQTYPYTFGGGTKVEIKGGSGGQAVVTQEPSLTVSPGGTVTLTCGSSTGAVTTSNYANWVQEKPGQAFRGLIGGTNKRAPGTPARFSGSLLGGKAALTLSGAQPEDEAEYYCALWYSNLWVFGGGTKLTVLGSGGSAGSGSGGGGSASGSGEVQLLESGGGLVQPGGSLRLSCAASGFTFSTYAMNWVRQAPGKGLEWVSRIRSKYNNYATYYADSVKGRFTISRDDSKNTLYLQMNSLRAEDTAVYYCVRHGNFGNSYVSWFAYWGQGTLVTVSSGGSGGQVQLVQSGAEVKKPGASVKVSCKASGYTFTSYYIHWVRQAPGQGLEWIGSIYPGNVNTNYNEKFKDRATLTVDTSISTAYMELSRLRSDDTAVYFCTRSHYGLDWNFDVWGQGTTVTVSSASGGSGDKTHTCPPCPAPEAAGGPSVFLFPPKPKDTLMISRTPEVTCVVVDVSHEDPEVKFNWYVDGVEVHNAKTKPREEQYNSTYRVVSVLTVLHQDWLNGKEYKCKVSNKALAAPIEKTISKAKGQPREPQVCTLPPSRDELTKNQVSLSCAVKGFYPSDIAVEWESNGQPENNYKTTPPVLDSDGSFFLVSKLTVDKSRWQQGNVFSCSVMHEALHNHYTQKSLSLSPG

SEQ ID NO: 648 - DNA, 2169 bp, synthetic construct
  misc_feature 1..2169: note = Artificial Sequence
  source 1..2169: mol_type = other DNA
gacatccagatgacacagagccctagcagcctgtctgccagcgtgggagacagagtgaccatcacatgtcacgccagccagaacatctacgtgtggctgaactggtatcagcagaagcccggcaaggcccctaagctgctgatctacaaggccagcaatctgcacaccggcgtgcccagcagattttctggctctggcagcggcaccgacttcaccctgaccatatctagcctgcagcctgaggacttcgccacctactattgtcagcagggccagacatacccctacacctttggcggcggaacaaaggtggaaatcaagggcggatctggcggccaggccgtggttacacaagagccttctctgaccgtgtctcctggcggcacagtgacactgacatgtggcagttctacaggcgccgtgaccaccagcaattacgccaactgggtgcaagagaagccaggccaggccttcagaggactgatcggcggcacaaacaagagagcccctggaacaccagccagattcagcggatctctgctcggaggaaaggccgcactgacactgtctggtgcccagcctgaagatgaggccgagtactattgcgccctgtggtacagcaacctgtgggttttcggaggcggcaccaagctgacagtgcttggttctggcggcagcgccggaagtggtagtggtggcggaggatctgcttctggctctggagaagtgcagctgctggaatctggcggaggactggttcaacctggcggctctctgagactgtcttgtgccgccagcggcttcacctttagcacctacgccatgaactgggtccgacaggcccctggcaaaggccttgaatgggtgtcccggatcagaagcaagtacaacaactacgccacctactacgccgacagcgtgaagggcagattcaccatcagccgggacgacagcaagaacaccctgtacctgcagatgaacagcctgagagccgaggacaccgccgtgtactattgtgtgcggcacggcaacttcggcaacagctatgtgtcttggtttgcctactggggccagggcacactggtcacagttagctctggcggaagcggaggacaggttcagctggttcagtctggcgccgaagtgaagaaacctggcgcctctgtgaaggtgtcctgcaaggccagcggctacacctttaccagctactacatccactgggtccgacaggcccctggacaaggactggaatggatcggcagcatctaccccggcaacgtgaacaccaactacaacgagaagttcaaggaccgggccacactgaccgtggacacctctatcagcaccgcctacatggaactgagccggctgagatccgatgataccgccgtgtacttctgcaccagaagccactacggcctggactggaacttcgatgtgtggggccagggcaccaccgtgacagtttcttctgcttctggaggctccggagataagacccacacatgtcctccatgtcctgctccagaggctgctggtggcccttccgtgtttctgttccctccaaagcctaaggacaccctgatgatcagcaggacccctgaagtgacctgcgtggtggtggatgtgtctcacgaggacccagaagtgaagttcaattggtacgtggacggcgtggaagtgcacaacgccaagaccaagcctagagaggaacagtacaacagcacctacagagtggtgtccgtgctgaccgtgctgcaccaggattggctgaacggcaaagagtacaagtgcaaggtgtccaacaaggccctggccgctcctatcgagaaaaccatcagcaaggccaagggccagcctcgcgaacctcaagtctgtacactgcctcctagccgggacgagctgaccaagaatcaggtgtcactgagctgcgccgtgaagggcttttaccccagcgacattgccgtggaatgggagagcaatggccagccagagaacaactacaagacaacccctcctgtgctggacagcgacggctcatttttcctggtgtccaagctgacagtggacaagagcagatggcagcagggcaacgtgttcagctgcagcgtgatgcacgaggccctgcacaaccactacacccagaaaagcctgtctctgagccctggc

SEQ ID NO: 649 - protein, 722 aa, synthetic construct
  REGION 1..722: note = Artificial Sequence
SYVLTQPPSVSVAPGQTARITCGGNNIGSKSVHWYQQPPGQAPVVVVYDDSDRPSGIPERFSGSNSGNTATLTISRVEAGDEAVYYCQVWDSSSDHVVFGGGTKLTVLGGSGGDIVMTQTPLSLPVTPGEPASISCRSSKSLLHSNGITYLYWYLQKPGQSPQLLIYQMSNLVSGVPDRFSGSGSGTDFTLKISRVEAEDVGVYYCAQNLELPYTFGGGTKVEIKGSGGSAGSGSGGGGSASGSGQVQLVQSGAEVKKPGSSVKVSCKASGYAFSYSWINWVRQAPGQGLEWMGRIFPGDGDTDYNGKFKGRVTITADKSTSTAYMELSSLRSEDTAVYYCARNVFDGYWLVYWGQGTLVTVSSGGSGGQLQLQESGPGLVKPSETLSLTCTVSGGSISSGSYFWGWIRQPPGKGLEWIGSIYYSGITYYNPSLKSRVTISVDTSKNQFSLKLSSVTAADTAVYYCARHDGAVAGLFDYWGQGTLVTVSSASGGSGDKTHTCPPCPAPEAAGGPSVFLFPPKPKDTLMISRTPEVTCVVVDVSHEDPEVKFNWYVDGVEVHNAKTKPREEQYNSTYRVVSVLTVLHQDWLNGKEYKCKVSNKALAAPIEKTISKAKGQPREPQVYTLPPCRDELTKNQVSLWCLVKGFYPSDIAVEWESNGQPENNYKTTPPVLDSDGSFFLYSKLTVDKSRWQQGNVFSCSVMHEALHNHYTQKSLSLSPG

SEQ ID NO: 650 - DNA, 2166 bp, synthetic construct
  misc_feature 1..2166: note = Artificial Sequence
  source 1..2166: mol_type = other DNA
agctacgtgctgacacaacctccatctgtgtctgtggcccctggccagacagccagaattacatgcggcggcaacaacatcggcagcaagtccgtgcattggtatcagcagcctccaggacaggctcctgtggtggtggtgtacgacgacagcgatagacctagcggcatccccgagagattcagcggcagcaatagcggcaataccgccacactgaccatcagcagagttgaggctggcgacgaggccgtgtactattgccaagtgtgggacagcagcagcgatcacgtggtgtttggcggcggaacaaagctgacagtgctcggcggatctggcggcgacatcgtgatgacccagacacctctgagcctgcctgtgacacctggcgaacctgccagcatcagctgcagaagcagcaagagcctgctgcacagcaacggcatcacctacctgtactggtatctgcagaaacccggccagtctcctcagctgctgatctaccagatgagcaacctggtgtccggcgtgcccgatagattttctggcagcggctctggcaccgacttcaccctgaagattagcagagtggaagccgaggacgtgggcgtgtactactgtgcccagaacctggaactgccctacacctttggcggaggcaccaaggtggaaatcaagggttctggcggcagcgccggaagtggtagtggtggcggaggatctgcttctggctctggacaggttcagctggttcagtctggcgccgaagtgaagaaacctggcagcagcgtgaaggtgtcctgcaaggcctctggctacgccttcagctacagctggatcaactgggtccgacaggcccctggacaaggcttggaatggatgggcagaatcttccccggcgacggcgacaccgattacaacggcaagttcaagggcagagtgaccatcaccgccgacaagagcacaagcaccgcctacatggaactgagcagcctgagaagcgaggacaccgccgtgtactactgcgccagaaacgtgttcgacggctactggctggtgtattggggccagggaacactggtcacagtgtccagcggcggaagcggaggacagctccagctgcaagagtctggccctggactggtcaagcctagcgagacactgagcctgacatgtaccgtgtctggcggcagcatctccagcggctcctatttctggggctggatcagacaacctcctggcaaaggcctggaatggatcggctccatctactacagcggaatcacctactacaaccccagcctgaagtccagagtgaccatctccgtggacaccagcaagaaccagttctccctgaagctgagcagcgtgacagccgccgataccgccgtctattactgcgccagacatgatggcgctgtggccggcctgtttgattattggggacagggcaccctggtcaccgttagcagcgcttctggaggctccggagataagacccacacatgtcctccatgtcctgctccagaagctgctggcggcccttctgtgttcctgtttcctccaaagcctaaggacaccctgatgatcagcagaacccctgaagtgacctgcgtggtggtggatgtgtctcacgaggaccccgaagtgaagttcaattggtacgtggacggcgtggaagtgcacaacgccaagaccaagcctagagaggaacagtacaacagcacctacagagtggtgtccgtgctgaccgtgctgcaccaggattggctgaacggcaaagagtacaagtgcaaggtgtccaacaaggccctggccgctcctatcgagaaaaccatcagcaaggccaagggccagcctagggaaccccaggtttacacccttcctccatgccgggatgagctgaccaagaaccaggtgtccctgtggtgtctcgtgaagggcttctaccccagcgacattgccgtggaatgggagagcaatggccagcctgagaacaactacaagacaacccctcctgtgctggacagcgacggctcattcttcctgtacagcaagctgacagtcgacaagtccagatggcagcagggcaacgtgttcagttgcagcgtgatgcacgaggccctgcacaaccactacacccagaagtccctgagcctgtctcctgga

SEQ ID NO: 651 - protein, 723 aa, synthetic construct; identical to SEQ ID NO: 643
  REGION 1..723: note = Artificial Sequence

SEQ ID NO: 652 - DNA, 2169 bp, synthetic construct; identical to SEQ ID NO: 644
  misc_feature 1..2169: note = Artificial Sequence
  source 1..2169: mol_type = other DNA

SEQ ID NO: 653 - protein, 722 aa, synthetic construct; identical to SEQ ID NO: 649
  REGION 1..722: note = Artificial Sequence

SEQ ID NO: 654 - DNA, 2166 bp, synthetic construct; identical to SEQ ID NO: 650
  misc_feature 1..2166: note = Artificial Sequence
  source 1..2166: mol_type = other DNA

SEQ ID NO: 655 - protein, 723 aa, synthetic construct; identical to SEQ ID NO: 647
  REGION 1..723: note = Artificial Sequence

SEQ ID NO: 656 - DNA, 2169 bp, synthetic construct; identical to SEQ ID NO: 648
  misc_feature 1..2169: note = Artificial Sequence
  source 1..2169: mol_type = other DNA

SEQ ID NO: 657 - protein, 724 aa, synthetic construct; identical to SEQ ID NO: 633
  REGION 1..724: note = Artificial Sequence

SEQ ID NO: 658 - DNA, 2172 bp, synthetic construct; identical to SEQ ID NO: 634
  misc_feature 1..2172: note = Artificial Sequence
  source 1..2172: mol_type = other DNA

SEQ ID NO: 659 - protein, 723 aa, synthetic construct; identical to SEQ ID NO: 643
  REGION 1..723: note = Artificial Sequence

SEQ ID NO: 660 - DNA, 2169 bp, synthetic construct; identical to SEQ ID NO: 644
  misc_feature 1..2169: note = Artificial Sequence
  source 1..2169: mol_type = other DNA

SEQ ID NO: 661 - protein, 724 aa, synthetic construct; identical to SEQ ID NO: 633
  REGION 1..724: note = Artificial Sequence

SEQ ID NO: 662 - DNA, 2172 bp, synthetic construct; identical to SEQ ID NO: 634
  misc_feature 1..2172: note = Artificial Sequence
  source 1..2172: mol_type = other DNA

SEQ ID NO: 663 - protein, 723 aa, synthetic construct; identical to SEQ ID NO: 647
  REGION 1..723: note = Artificial Sequence

SEQ ID NO: 664 - DNA, 2169 bp, synthetic construct; identical to SEQ ID NO: 648
  misc_feature 1..2169: note = Artificial Sequence
  source 1..2169: mol_type = other DNA

SEQ ID NO: 665 - protein, 476 aa, synthetic construct
  REGION 1..476: note = Artificial Sequence
EIVLTQSPGTLSLSPGETAIISCRTSQYGSLAWYQQRPGQAPRLVIYSGSTRAAGIPDRFSGSRWGPDYNLTISNLESGDFGVYYCQQYEFFGQGTKVQVDIKGGGGSGGSGSGGGGSASGSGQVQLVQSGGQMKKPGESMRISCRASGYEFIDCTLNWIRLAPGKRPEWMGWLKPRGGAVNYARPLQGRVTMTRDVYSDTAFLELRSLTVDDTAVYFCTRGKNCDYNWDFEHWGRGTPVIVSSASGGSGDKTHTCPPCPAPELLGGPSVFLFPPKPKDTLMISRTPEVTCVVVDVSHEDPEVKFNWYVDGVEVHNAKTKPREEQYNSTYRVVSVLTVLHQDWLNGKEYKCKVSNKALPAPIEKTISKAKGQPREPQVYTLPPCRDELTKNQVSLWCLVKGFYPSDIAVEWESNGQPENNYKTTPPVLDSDGSFFLYSKLTVDKSRWQQGNVFSCSVMHEALHNHYTQKSLSLSPG

SEQ ID NO: 666 - DNA, 1428 bp, synthetic construct; identical to SEQ ID NO: 347
  misc_feature 1..1428: note = Artificial Sequence
  source 1..1428: mol_type = other DNA

SEQ ID NO: 667 - protein, 738 aa, synthetic construct; identical to SEQ ID NO: 202
  REGION 1..738: note = Artificial Sequence

SEQ ID NO: 668 - DNA, 2214 bp, synthetic construct; identical to SEQ ID NO: 354
  misc_feature 1..2214: note = Artificial Sequence
  source 1..2214: mol_type = other DNA

SEQ ID NO: 669 - protein, 758 aa, synthetic construct
  REGION 1..758: note = Artificial Sequence
QSVLTQPPSVSAAPGQKVTISCSGNTSNIGNNFVSWYQQRPGRAPQLLIYETDKRPSGIPDRFSASKSGTSGTLAITGLQTGDEADYYCATWAASLSSARVFGTGTKVIVLGGGGSSYVRPLSVALGETARISCGRQALGSRAVQWYQHRPGQAPILLIYNNQDRPSGIPERFSGTPDINFGTRATLTISGVEAGDEADYYCHMWDSRSGFSWSFGGATRLTVLGSGGSGGSGSGGGGSASGSGQVQLQESGPGLVKPSETLSVTCSVSGDSMNNYYWTWIRQSPGKGLEWIGYISDRESATYNPSLNSRVVISRDTSKNQLSLKLNSVTPADTAVYYCATARRGQRIYGVVSFGEFFYYYSMDVWGKGTTVTVSSGGGGSQVQLVESGGGVVQPGTSLRLSCAASQFRFDGYGMHWVRQAPGKGLEWVASISHDGIKKYHAEKVWGRFTISRDNSKNTLYLQMNSLRPEDTALYYCAKDLREDECEEWWSDYYDFGKQLPCAKSRGGLVGIADNWGQGTMVTVSSASGGSGDKTHTCPPCPAPELLGGPSVFLFPPKPKDTLMISRTPEVTCVVVDVSHEDPEVKFNWYVDGVEVHNAKTKPREEQYNSTYRVVSVLTVLHQDWLNGKEYKCKVSNKALPAPIEKTISKAKGQPREPQVYTLPPCRDELTKNQVSLWCLVKGFYPSDIAVEWESNGQPENNYKTTPPVLDSDGSFFLYSKLTVDKSRWQQGNVFSCSVLHEALHSHYTQKSLSLSPG

SEQ ID NO: 670 - DNA, 2274 bp, synthetic construct
  misc_feature 1..2274: note = Artificial Sequence
  source 1..2274: mol_type = other DNA
cagtctgtgctgacacagcctccatccgtgtctgctgcccctggccagaaagtgaccatcagctgtagcggcaacaccagcaacatcggcaacaacttcgtgtcctggtatcagcagaggcccggcagagcacctcagctgctgatctacgagacagacaagaggcccagcggcatccccgatagattttccgccagcaagagcggcacctctggcacactggctatcacaggactgcagacaggcgacgaggccgattactactgtgctacatgggccgccagcctgtctagcgccagagtttttggcaccggcaccaaagtgatcgtgctgggcggaggcggttctagctacgtcagacctctgtctgtggccctgggagagacagccagaatcagctgtggcagacaggctctgggaagcagagccgtgcagtggtatcagcacagacctggacaggcccctatcctgctgatctacaacaaccaggacagacccagcggcatccccgagagattttctggcacccctgacatcaacttcggcaccagagccacactgaccatctctggcgttgaagccggcgacgaggccgattactactgtcacatgtgggacagcagaagcggcttcagctggtcttttggcggagccaccagactgacagtgctgggttctggcggaagcggaggatctggatctggtggtggtggatctgcttctggcagtggacaggttcagctgcaagagtctggccctggcctggtcaagcctagcgaaacactgagcgtgacctgtagcgtgtccggcgacagcatgaacaactactactggacctggatcagacagagccccggcaaaggcctggaatggatcggctacatcagcgacagagagagcgccacctacaatcccagcctgaacagcagagtggtcatcagccgggacaccagcaagaaccagctgagcctgaagctgaacagcgtgacccctgccgataccgccgtgtactattgtgccaccgccagaagaggccagcggatctatggcgtggtgtccttcggcgagttcttctactactacagcatggacgtgtggggcaagggcaccaccgtgacagtgtctagcggaggcggaggtagtcaggttcagctggtggaatctggtggcggagtggtgcagcctggcacatctctgagactgtcttgtgccgcctctcagttcagattcgacggctacggaatgcactgggtccgacaggcacctggcaaaggccttgaatgggtcgccagcatcagccacgacggcatcaagaagtaccacgccgagaaagtgtggggcagattcaccatcagccgggacaacagcaagaacaccctgtacctgcagatgaacagcctgcggcctgaggacacagccctgtactattgcgccaaggacctgcgcgaggacgagtgtgaagaatggtggagcgactactacgacttcggcaagcagctgccctgcgccaaaagtagaggtggccttgtgggaatcgccgacaactggggacagggcacaatggtcacagtgtcctctgcttctggcggctccggagataagacccacacatgtcctccatgtcctgctccagaactgctcggcggcccttctgtgttcctgtttcctccaaagcctaaggacaccctgatgatcagcagaacccctgaagtgacctgcgtggtggtggatgtgtctcacgaggaccccgaagtgaagttcaattggtacgtggacggcgtggaagtgcacaacgccaagaccaagcctagagaggaacagtacaacagcacctacagagtggtgtccgtgctgaccgtgctgcaccaggattggctgaacggcaaagagtacaagtgcaaggtgtccaacaaggccctgcctgctcctatcgagaaaaccatcagcaaggccaagggccagcctagggaaccccaggtttacacccttcctccatgccgggatgagctgaccaagaaccaggtgtccctgtggtgtctcgtgaagggcttctaccccagcgacattgccgtggaatgggagagcaatggccagcctgagaacaactacaagacaacccctcctgtgctggacagcgacggctcattcttcctgtacagcaagctgacagtcgacaagtccagatggcagcagggcaacgtgttcagttgcagcgtgctgcacgaggccctgcacagtcactacacccagaagtccctgagcctgtctcctgga

SEQ ID NO: 671 - protein, 723 aa, synthetic construct
  REGION 1..723: note = Artificial Sequence
EIVLTQSPGTLSLSPGETAIISCRTSQYGSLAWYQQRPGQAPRLVIYSGSTRAAGIPDRFSGSRWGPDYNLTISNLESGDFGVYYCQQYEFFGQGTKVQVDIKGGSSGSDISVAPGETARISCGEKSLGSRAVQWYQHRAGQAPSLIIYNNQDRPSGIPERFSGSPDSPFGTTATLTITSVEAGDEADYYCHIWDSRVPTKWVFGGGTTLTVLGGGGSGGSGSGGGGSASGSGQMQLQESGPGLVKPSETLSLTCSVSGASISDSYWSWIRRSPGKGLEWIGYVHKSGDTNYSPSLKSRVNLSLDTSKNQVSLSLVAATAADSGKYYCARTLHGRRIYGIVAFNEWFTYFYMDVWGNGTQVTVSSGGSSGQVQLVQSGGQMKKPGESMRISCRASGYEFIDCTLNWIRLAPGKRPEWMGWLKPRGGAVNYARPLQGRVTMTRDVYSDTAFLELRSLTVDDTAVYFCTRGKNCDYNWDFEHWGRGTPVIVSSASGGSGDKTHTCPPCPAPELLGGPSVFLFPPKPKDTLMISRTPEVTCVVVDVSHEDPEVKFNWYVDGVEVHNAKTKPREEQYNSTYRVVSVLTVLHQDWLNGKEYKCKVSNKALPAPIEKTISKAKGQPREPQVCTLPPSRDELTKNQVSLSCAVKGFYPSDIAVEWESNGQPENNYKTTPPVLDSDGSFFLVSKLTVDKSRWQQGNVFSCSVMHEALHNHYTQKSLSLSPG

SEQ ID NO: 672 - DNA, 2169 bp, synthetic construct; identical to SEQ ID NO: 351
  misc_feature 1..2169: note = Artificial Sequence
  source 1..2169: mol_type = other DNA

SEQ ID NO: 673 - protein, 758 aa, synthetic construct
  REGION 1..758: note = Artificial Sequence
SYVRPLSVALGETARISCGRQALGSRAVQWYQHRPGQAPILLIYNNQDRPSGIPERFSGTPDINFGTRATLTISGVEAGDEADYYCHMWDSRSGFSWSFGGATRLTVLGGGGSQSVLTQPPSVSAAPGQKVTISCSGNTSNIGNNFVSWYQQRPGRAPQLLIYETDKRPSGIPDRFSASKSGTSGTLAITGLQTGDEADYYCATWAASLSSARVFGTGTKVIVLGSGGSGGSGSGGGGSASGSGQVQLVESGGGVVQPGTSLRLSCAASQFRFDGYGMHWVRQAPGKGLEWVASISHDGIKKYHAEKVWGRFTISRDNSKNTLYLQMNSLRPEDTALYYCAKDLREDECEEWWSDYYDFGKQLPCAKSRGGLVGIADNWGQGTMVTVSSGGGGSQVQLQESGPGLVKPSETLSVTCSVSGDSMNNYYWTWIRQSPGKGLEWIGYISDRESATYNPSLNSRVVISRDTSKNQLSLKLNSVTPADTAVYYCATARRGQRIYGVVSFGEFFYYYSMDVWGKGTTVTVSSASGGSGDKTHTCPPCPAPELLGGPSVFLFPPKPKDTLMISRTPEVTCVVVDVSHEDPEVKFNWYVDGVEVHNAKTKPREEQYNSTYRVVSVLTVLHQDWLNGKEYKCKVSNKALPAPIEKTISKAKGQPREPQVYTLPPCRDELTKNQVSLWCLVKGFYPSDIAVEWESNGQPENNYKTTPPVLDSDGSFFLYSKLTVDKSRWQQGNVFSCSVLHEALHSHYTQKSLSLSPG

SEQ ID NO: 674 - DNA, 2274 bp, synthetic construct
  misc_feature 1..2274: note = Artificial Sequence
  source 1..2274: mol_type = other DNA
agctacgtcagacctctgtctgtggccctgggagagacagccagaatcagctgtggcagacaggctctgggaagcagagccgtgcagtggtatcagcacagacctggacaggcccctatcctgctgatctacaacaaccaggacagacccagcggcatccccgagagattttctggcacccctgacatcaacttcggcaccagagccacactgaccatctctggcgttgaagccggcgacgaggccgattactactgtcacatgtgggacagcagaagcggcttcagctggtcttttggcggagccaccagactgacagtgctgggcggaggcggttctcagtctgtgctgacacagcctccatccgtgtctgctgcccctggccagaaagtgaccatcagctgtagcggcaacaccagcaacatcggcaacaacttcgtgtcctggtatcagcagaggcccggcagagcacctcagctgctgatctacgagacagacaagaggcccagcggcatccccgatagattttccgccagcaagagcggcacctctggcacactggctatcacaggactgcagacaggcgacgaggccgattactactgtgctacatgggccgccagcctgtctagcgccagagtttttggcaccggcaccaaagtgatcgtgctgggttctggcggaagcggaggatctggatctggtggtggtggatctgcttctggcagtggacaggttcagctggtggaatctggtggcggagtggtgcagcctggcacatctctgagactgtcttgtgccgcctctcagttcagattcgacggctacggaatgcactgggtccgacaggcacctggcaaaggccttgaatgggtcgccagcatcagccacgacggcatcaagaagtaccacgccgagaaagtgtggggcagattcaccatcagccgggacaacagcaagaacaccctgtacctgcagatgaacagcctgcggcctgaggacacagccctgtactattgcgccaaggacctgcgcgaggacgagtgtgaagaatggtggagcgactactacgacttcggcaagcagctgccctgcgccaaaagtagaggtggccttgtgggaatcgccgacaactggggacagggcacaatggtcacagtgtcctctggaggcggaggtagtcaggttcagctgcaagagtctggccctggcctggtcaagcctagcgaaacactgagcgtgacctgtagcgtgtccggcgacagcatgaacaactactactggacctggatcagacagagccccggcaaaggcctggaatggatcggctacatcagcgacagagagagcgccacctacaatcccagcctgaacagcagagtggtcatcagccgggacaccagcaagaaccagctgagcctgaagctgaacagcgtgacccctgccgataccgccgtgtactattgtgccaccgccagaagaggccagcggatctatggcgtggtgtccttcggcgagttcttctactactacagcatggacgtgtggggcaagggcaccaccgtgacagtgtctagcgcttctggcggctccggagataagacccacacatgtcctccatgtcctgctccagaactgctcggcggcccttctgtgttcctgtttcctccaaagcctaaggacaccctgatgatcagcagaacccctgaagtgacctgcgtggtggtggatgtgtctcacgaggaccccgaagtgaagttcaattggtacgtggacggcgtggaagtgcacaacgccaagaccaagcctagagaggaacagtacaacagcacctacagagtggtgtccgtgctgaccgtgctgcaccaggattggctgaacggcaaagagtacaagtgcaaggtgtccaacaaggccctgcctgctcctatcgagaaaaccatcagcaaggccaagggccagcctagggaaccccaggtttacacccttcctccatgccgggatgagctgaccaagaaccaggtgtccctgtggtgtctcgtgaagggcttctaccccagcgacattgccgtggaatgggagagcaatggccagcctgagaacaactacaagacaacccctcctgtgctggacagcgacggctcattcttcctgtacagcaagctgacagtcgacaagtccagatggcagcagggcaacgtgttcagttgcagcgtgctgcacgaggccctgcacagtcactacacccagaagtccctgagcctgtctcctgga

SEQ ID NO: 675 - protein, 723 aa, synthetic construct; identical to SEQ ID NO: 671
  REGION 1..723: note = Artificial Sequence

SEQ ID NO: 676 - DNA, 2169 bp, synthetic construct; identical to SEQ ID NO: 351
  misc_feature 1..2169: note = Artificial Sequence
  source 1..2169: mol_type = other DNA

SEQ ID NO: 677 - protein, 758 aa, synthetic construct
  REGION 1..758: note = Artificial Sequence
QSVLTQPPSVSAAPGQKVTISCSGNTSNIGNNFVSWYQQRPGRAPQLLIYETDKRPSGIPDRFSASKSGTSGTLAITGLQTGDEADYYCATWAASLSSARVFGTGTKVIVLGGGGSESALTQPPSASGSPGQSITISCTGTSNNFVSWYQQHAGKAPKLVIYDVNKRPSGVPDRFSGSKSGNTASLTVSGLQTDDEAVYYCGSLVGNWDVIFGGGTKLTVLGSGGSGGSGSGGGGSASGSGEPQLQESGPTLVEASETLSLTCAVSGDSTAACNSFWGWVRQPPGKGLEWVGSLSHCASYWNRGWTYHNPSLKSRLTLALDTPKNLVFLKLNSVTAADTATYYCARFGGEVLRYTDWPKPAWVDLWGRGTLVTVSSGGGGSQVQLVESGGGVVQPGTSLRLSCAASQFRFDGYGMHWVRQAPGKGLEWVASISHDGIKKYHAEKVWGRFTISRDNSKNTLYLQMNSLRPEDTALYYCAKDLREDECEEWWSDYYDFGKQLPCAKSRGGLVGIADNWGQGTMVTVSSASGGSGDKTHTCPPCPAPELLGGPSVFLFPPKPKDTLMISRTPEVTCVVVDVSHEDPEVKFNWYVDGVEVHNAKTKPREEQYNSTYRVVSVLTVLHQDWLNGKEYKCKVSNKALPAPIEKTISKAKGQPREPQVYTLPPCRDELTKNQVSLWCLVKGFYPSDIAVEWESNGQPENNYKTTPPVLDSDGSFFLYSKLTVDKSRWQQGNVFSCSVLHEALHSHYTQKSLSLSPG

SEQ ID NO: 678 - DNA, 2274 bp, synthetic construct
  misc_feature 1..2274: note = Artificial Sequence
  source 1..2274: mol_type = other DNA
cagtctgtgctgacacagcctccatccgtgtctgctgcccctggccagaaagtgaccatcagctgtagcggcaacaccagcaacatcggcaacaacttcgtgtcctggtatcagcagaggcccggcagagcacctcagctgctgatctacgagacagacaagaggcccagcggcatccccgatagattttccgccagcaagagcggcacctctggcacactggctatcacaggactgcagacaggcgacgaggccgattactactgtgctacatgggccgccagcctgtctagcgccagagtttttggcaccggcaccaaagtgatcgtgctgggcggaggcggttctgaaagcgctctgacccagcctccatctgcatctggaagccctggccagagcatcaccatcagctgtaccggcaccagcaacaacttcgtgtcctggtatcaacagcacgccggcaaggcccctaagctggtcatctacgacgtgaacaagaggccctccggcgtgcccgatagattcagcggctctaagtctggcaacaccgccagcctgactgtgtctggcctgcagacagatgatgaggccgtgtattactgcggcagcctcgtcggaaactgggacgtgatatttggaggcggcaccaagctgaccgtgctgggttctggcggaagcggaggatctggatctggtggtggtggatctgcttctggcagtggagaacctcagctccaagaaagcggccccacactggtggaagcctctgaaaccctgtctctgacctgtgccgtgtctggggattctaccgccgcctgcaatagcttctggggctgggttcgacagcctcctggaaagggactcgagtgggtcggaagcctgtctcactgtgccagctactggaacagaggctggacctatcacaaccctagcctgaagtccaggctgaccctggctctggacacccctaagaacctggtgttcctgaaactgaactccgtgacagccgccgacacagccacctactactgcgctagatttggcggcgaggtgctgagatacaccgactggcctaaacctgcctgggttgacctgtggggcagaggcacactggttaccgtgtcctctggaggcggaggtagtcaggttcagctggtggaatctggtggcggagtggtgcagcctggcacatctctgagactgtcttgtgccgcctctcagttcagattcgacggctacggaatgcactgggtccgacaggcacctggcaaaggccttgaatgggtcgccagcatcagccacgacggcatcaagaagtaccacgccgagaaagtgtggggcagattcaccatcagccgggacaacagcaagaacaccctgtacctgcagatgaacagcctgcggcctgaggacacagccctgtactattgcgccaaggacctgcgcgaggacgagtgtgaagaatggtggagcgactactacgacttcggcaagcagctgccctgcgccaaaagtagaggtggccttgtgggaatcgccgacaactggggacagggcacaatggtcacagtgtcctctgcttctggcggctccggagataagacccacacatgtcctccatgtcctgctccagaactgctcggcggcccttctgtgttcctgtttcctccaaagcctaaggacaccctgatgatcagcagaacccctgaagtgacctgcgtggtggtggatgtgtctcacgaggaccccgaagtgaagttcaattggtacgtggacggcgtggaagtgcacaacgccaagaccaagcctagagaggaacagtacaacagcacctacagagtggtgtccgtgctgaccgtgctgcaccaggattggctgaacggcaaagagtacaagtgcaaggtgtccaacaaggccctgcctgctcctatcgagaaaaccatcagcaaggccaagggccagcctagggaaccccaggtttacacccttcctccatgccgggatgagctgaccaagaaccaggtgtccctgtggtgtctcgtgaagggcttctaccccagcgacattgccgtggaatgggagagcaatggccagcctgagaacaactacaagacaacccctcctgtgctggacagcgacggctcattcttcctgtacagcaagctgacagtcgacaagtccagatggcagcagggcaacgtgttcagttgcagcgtgctgcacgaggccctgcacagtcactacacccagaagtccctgagcctgtctcctgga

SEQ ID NO: 679 - protein, 723 aa, synthetic construct; identical to SEQ ID NO: 671
  REGION 1..723: note = Artificial Sequence

SEQ ID NO: 680 - DNA, 2169 bp, synthetic construct; identical to SEQ ID NO: 351
  misc_feature 1..2169: note = Artificial Sequence
  source 1..2169: mol_type = other DNA

SEQ ID NO: 681-684 - skipped (4 entries)

SEQ ID NO: 685 - protein, 5 aa, synthetic construct
  REGION 1..5: note = Artificial Sequence
GGSGG

SEQ ID NO: 686 - protein, 20 aa, synthetic construct
  REGION 1..20: note = Artificial Sequence
GSGGSAGSGSGGGGSASGSG

SEQ ID NO: 687 - protein, 5 aa, synthetic construct
  REGION 1..5: note = Artificial Sequence
GGGGS

SEQ ID NO: 688 - protein, 20 aa, synthetic construct
  REGION 1..20: note = Artificial Sequence
GSGGSGGSGSGGGGSASGSG

1-127. (canceled)

128. An antigen binding polypeptide complex comprising a first polypeptide and a second polypeptide;
wherein the first polypeptide has a structure represented by:
VL1-VL2-VH2-VH1-Fc;
VH1-VH2-VL2-VL1-Fc;
VL1-L1-VL2-L2-VH2-L3-VH1-Fc;
VH1-L1-VH2-L2-VL2-L3-VL1-Fc;
VL1-L1-VL2-L2-VH2-L3-VH1-L4-Fc; or
VH1-L1-VH2-L2-VL2-L3-VL1-L4-Fc;
wherein the second polypeptide has a structure represented by:
VL3-VL4-VH4-VH3-Fc;
VH3-VH4-VL4-VL3-Fc;
VL3-L5-VL4-L6-VH4-L7-VH3-Fc;
VH3-L5-VH4-L6-VL4-L7-VL3-Fc;
VL3-L5-VL4-L6-VH4-L7-VH3-L8-Fc; or
VH3-L5-VH4-L6-VL4-L7-VL3-L8-Fc; and
wherein:
VL1 is a first immunoglobulin light chain variable region;
VL2 is a second immunoglobulin light chain variable region;
VL3 is a third immunoglobulin light chain variable region;
VL4 is a fourth immunoglobulin light chain variable region;
VH1 is a first immunoglobulin heavy chain variable region;
VH2 is a second immunoglobulin heavy chain variable region;
VH3 is a third immunoglobulin heavy chain variable region;
VH4 is a fourth immunoglobulin heavy chain variable region;
Fc is a region comprising an immunoglobulin heavy chain constant region 2 (CH2), an immunoglobulin heavy chain constant region 3 (CH3), and optionally, an immunoglobulin hinge; and
L1, L2, L3, L4, L5, L6, L7 and L8 are amino acid linkers.

129. The antigen binding polypeptide complex of claim 128,
wherein the first polypeptide has a structure represented by:
VL1-VL2-VH2-VH1-CH1-Fc;
VH1-VH2-VL2-VL1-CH1-Fc;
VL1-VL2-VH2-VH1-CL-Fc;
VH1-VH2-VL2-VL1-CL-Fc;
VL1-VL2-VH2-VH1-CH1-CL-Fc;
VH1-VH2-VL2-VL1-CH1-CL-Fc;
VL1-VL2-VH2-VH1-CL-CH1-Fc;
VH1-VH2-VL2-VL1-CL-CH1-Fc;
VL1-L1-VL2-L2-VH2-L3-VH1-L4-CH1-Fc;
VH1-L1-VH2-L2-VL2-L3-VL1-L4-CH1-Fc;
VL1-L1-VL2-L2-VH2-L3-VH1-L4-CL-Fc;
VH1-L1-VH2-L2-VL2-L3-VL1-L4-CL-Fc;
VL1-L1-VL2-L2-VH2-L3-VH1-L4-CH1-L5-CL-Fc;
VH1-L1-VH2-L2-VL2-L3-VL1-L4-CH1-L5-CL-Fc;
VL1-L1-VL2-L2-VH2-L3-VH1-L4-CL-L5-CH1-Fc;
VH1-L1-VH2-L2-VL2-L3-VL1-L4-CL-L5-CH1-Fc;
VL1-L1-VL2-L2-VH2-L3-VH1-L4-CH1-L5-CL-L6-Fc;
VH1-L1-VH2-L2-VL2-L3-VL1-L4-CH1-L5-CL-L6-Fc;
VL1-L1-VL2-L2-VH2-L3-VH1-L4-CL-L5-CH1-L6-Fc; or
VH1-L1-VH2-L2-VL2-L3-VL1-L4-CL-L5-CH1-L6-Fc;
wherein the second polypeptide has a structure represented by:
VL3-VL4-VH4-VH3-CH1-Fc;
VH3-VH4-VL4-VL3-CH1-F c;
VL3-VL4-VH4-VH3-CL-Fc;
VH3-VH4-VL4-VL3-CL-F c;
VL3-VL4-VH4-VH3-CH1-CL-Fc;
VH3-VH4-VL4-VL3-CH1-CL-F c;
VL3-VL4-VH4-VH3-CL-CH1-Fc;
VH3-VH4-VL4-VL3-CL-CH1-F c;
VL3-L7-VL4-L8-VH4-L9-VH3-L10-CH1-Fc;
VH3-L7-VH4-L8-VL4-L9-VL3-L10-CH1-F c;
VL3-L7-VL4-L8-VH4-L9-VH3-L10-CL-Fc;
VH3-L7-VH4-L8-VL4-L9-VL3-L10-CL-Fc;
VL3-L7-VL4-L8-VH4-L9-VH3-L10-CH1-L11-CL-Fc;
VH3-L7-VH4-L8-VL4-L9-VL3-L10-CH1-L11-CL-F c;
VL3-L7-VL4-L8-VH4-L9-VH3-L10-CL-L11-CH1-Fc;
VH3-L7-VH4-L8-VL4-L9-VL3-L10-CL-L11-CH1-F c;
VL3-L7-VL4-L8-VH4-L9-VH3-L10-CH1-L11-CL-L12-Fc;
VH3-L7-VH4-L8-VL4-L9-VL3-L10-CH1-L11-CL-L12-Fc;
VL3-L7-VL4-L8-VH4-L9-VH3-L10-CL-L11-CH1-L12-Fc; or
VH3-L7-VH4-L8-VL4-L9-VL3-L10-CL-L11-CH1-L12-F c; and
wherein:
CH1 is an immunoglobulin heavy chain constant region 1;
CL is an immunoglobulin light chain constant region; and
L1, L2, L3, L4, L5, L6, L7, L8, L9, L10, L11 and L12 are amino acid linkers.

130. An antigen binding polypeptide complex comprising a first polypeptide and a second polypeptide;
wherein the first polypeptide has a structure represented by:
VL1-VL2-VH2-VH1-Fc;
VH1-VH2-VL2-VL1-Fc;
VL1-VL2-VH2-VH1-CH1-Fc;
VH1-VH2-VL2-VL1-CH1-Fc;
VL1-VL2-VH2-VH1-CL-Fc;
VH1-VH2-VL2-VL1-CL-Fc;
VL1-VL2-VH2-VH1-CH1-CL-Fc;
VH1-VH2-VL2-VL1-CH1-CL-Fc;
VL1-VL2-VH2-VH1-CL-CH1-Fc;
VH1-VH2-VL2-VL1-CL-CH1-Fc;
VL1-L1-VL2-L2-VH2-L3-VH1-Fc;
VH1-L1-VH2-L2-VL2-L3-VL1-Fc;
VL1-L1-VL2-L2-VH2-L3-VH1-L4-CH1-Fc;
VH1-L1-VH2-L2-VL2-L3-VL1-L4-CH1-Fc;
VL1-L1-VL2-L2-VH2-L3-VH1-L4-CL-Fc;
VH1-L1-VH2-L2-VL2-L3-VL1-L4-CL-Fc;
VL1-L1-VL2-L2-VH2-L3-VH1-L4-CH1-L5-CL-Fc;
VH1-L1-VH2-L2-VL2-L3-VL1-L4-CH1-L5-CL-Fc;
VL1-L1-VL2-L2-VH2-L3-VH1-L4-CL-L5-CH1-Fc;
VH1-L1-VH2-L2-VL2-L3-VL1-L4-CL-L5-CH1-Fc;
VL1-L1-VL2-L2-VH2-L3-VH1-L4-CH1-L5-CL-L6-Fc;
VH1-L1-VH2-L2-VL2-L3-VL1-L4-CH1-L5-CL-L6-Fc;
VL1-L1-VL2-L2-VH2-L3-VH1-L4-CL-L5-CH1-L6-Fc; or
VH1-L1-VH2-L2-VL2-L3-VL1-L4-CL-L5-CH1-L6-Fc;
wherein the second polypeptide has a structure represented by:
VL3-VL4-VH4-VH3-Fc;
VH3-VH4-VL4-VL3-F c;
VL3-VL4-VH4-VH3-CH1-Fc;
VH3-VH4-VL4-VL3-CH1-F c;
VL3-VL4-VH4-VH3-CL-Fc;
VH3-VH4-VL4-VL3-CL-F c;
VL3-VL4-VH4-VH3-CH1-CL-Fc;
VH3-VH4-VL4-VL3-CH1-CL-F c;
VL3-VL4-VH4-VH3-CL-CH1-Fc;
VH3-VH4-VL4-VL3-CL-CH1-F c;
VL3-L7-VL4-L8-VH4-L9-VH3-Fc;
VH3-L7-VH4-L8-VL4-L9-VL3-F c;
VL3-L7-VL4-L8-VH4-L9-VH3-L10-Fc;
VH3-L7-VH4-L8-VL4-L9-VL3-L10-Fc;
VL3-L7-VL4-L8-VH4-L9-VH3-L10-CH1-Fc;
VH3-L7-VH4-L8-VL4-L9-VL3-L10-CH1-F c;
VL3-L7-VL4-L8-VH4-L9-VH3-L10-CL-Fc;
VH3-L7-VH4-L8-VL4-L9-VL3-L10-CL-Fc;
VL3-L7-VL4-L8-VH4-L9-VH3-L10-CH1-L11-CL-Fc;
VH3-L7-VH4-L8-VL4-L9-VL3-L10-CH1-L11-CL-F c;
VL3-L7-VL4-L8-VH4-L9-VH3-L10-CL-L11-CH1-Fc;
VH3-L7-VH4-L8-VL4-L9-VL3-L10-CL-L11-CH1-F c;
VL3-L7-VL4-L8-VH4-L9-VH3-L10-CH1-L11-CL-L12-Fc;
VH3-L7-VH4-L8-VL4-L9-VL3-L10-CH1-L11-CL-L12-Fc;
VL3-L7-VL4-L8-VH4-L9-VH3-L10-CL-L11-CH1-L12-Fc; or
VH3-L7-VH4-L8-VL4-L9-VL3-L10-CL-L11-CH1-L12-F c; and
wherein:
VL1 is a first immunoglobulin light chain variable region;
VL2 is a second immunoglobulin light chain variable region;
VL3 is a third immunoglobulin light chain variable region;
VL4 is a fourth immunoglobulin light chain variable region;
VH1 is a first immunoglobulin heavy chain variable region;
VH2 is a second immunoglobulin heavy chain variable region;
VH3 is a third immunoglobulin heavy chain variable region;
VH4 is a fourth immunoglobulin heavy chain variable region;
Fc is a region comprising an immunoglobulin heavy chain constant region 2 (CH2), an immunoglobulin heavy chain constant region 3 (CH3), and optionally, an immunoglobulin hinge;
CH1 is an immunoglobulin heavy chain constant region 1;
CL is an immunoglobulin light chain constant region; and
L1, L2, L3, L4, L5, L6, L7, L8, L9, L10, L11 and L12 are amino acid linkers.

131. The antigen binding polypeptide complex of claim 128, wherein VH1, VL1, VH3 and VL3 bind to the same antigen.

132. The antigen binding polypeptide complex of claim 128, wherein VH2, VL2, VH4 and VL4 bind to the same antigen.

133. The antigen binding polypeptide complex of claim 128, wherein VH1, VH2, VH3 and VH4 each bind to different antigens, and VL1, VL2, VL3 and VL4 each bind to different antigens.

134. The antigen binding polypeptide complex of claim 128, wherein linkers L1, L2, L3, L4, L5, L6, L7 and L8 each comprise the amino acid sequence of any one of SEQ ID NOs:1-19 and 681-688, or a sequence having at least 95% identity to any one of SEQ ID NOs:1-19 and 681-688.

135. The antigen binding polypeptide complex of claim 129, wherein linkers L1, L2, L3, L4, L5, L6, L7, L8, L9, L10, L11 and L12 each comprise the amino acid sequence of any one of SEQ ID NOs:1-19 and 681-688, or a sequence having at least 95% identity to any one of SEQ ID NOs:1-19 and 681-688.

136. The antigen binding polypeptide complex of claim 130, wherein linkers L1, L2, L3, L4, L5, L6, L7, L8, L9, L10, L11 and L12 each comprise the amino acid sequence of any one of SEQ ID NOs:1-19 and 681-688, or a sequence having at least 95% identity to any one of SEQ ID NOs:1-19 and 681-688.

137. The antigen binding polypeptide complex of claim 128, wherein the Fc region comprises at least one knob-into-hole modification.

138. The antigen binding polypeptide complex claim 129, wherein the Fc region comprises at least one knob-into-hole modification.

139. The antigen binding polypeptide complex of claim 130, wherein the Fc region comprises at least one knob-into-hole modification.

140. An antibody or antigen binding fragment thereof comprising the antigen binding polypeptide complex of claim 128.

141. The antibody or antigen binding fragment thereof of claim 140, wherein the antigen binding fragment is a Fab, scFab, Fab′, F(ab′)2, Fv, or scFv.

142. The antibody or antigen binding fragment thereof of claim 140, wherein the antibody is human or humanized.

143. A polypeptide having at least 95% identity to any one of SEQ ID NOs:32-43, 62-79, 130-138, 633, 635, 637, 639, 641, 643, 645, 647, 649, 651, 653, 655, 657, 659, 661, 663, 665, 667, 669, 671, 673, 675, 677, and 679, or having at least 95% identity to the amino acid sequence of SEQ ID NOs:32 or 33 that does not contain the eight histidine residues at the C-terminus.

144. A polynucleotide having at least 95% identity to any one of SEQ ID NOs:44-55, 80-97, 139-147, 634, 636, 638, 640, 642, 644, 646, 648, 650, 652, 654, 656, 658, 660, 662, 664, 666, 668, 670, 672, 674, 676, 678, and 680.

145. A vector comprising the polynucleotide of claim 144.

146. A host cell comprising the polynucleotide of claim 144.

147. A pharmaceutical composition comprising (i) the antigen binding polypeptide complex of claim 128, and (ii) a pharmaceutically acceptable carrier.

148. A pharmaceutical composition comprising (i) a polynucleotide encoding the antigen binding polypeptide complex of claim 128, and (ii) a pharmaceutically acceptable carrier.

149. A method of treating or preventing a cancer, comprising administering to a subject in need thereof a therapeutically effective amount of the antigen binding polypeptide complex of claim 128.

150. A method of treating or preventing a virus infection, comprising administering to a subject in need thereof a therapeutically effective amount of the antigen binding polypeptide complex of claim 128.
